(19) United States
(12) Patent Application Publication
(10) Pub. No.: US 2004/0072323 A1
(43) Pub. Date: Apr. 15, 2004

(54) Diterpene-producing unicellular organism

(76) Inventors: Seiichi P.T. Matsuda, Houston, TX (US); Elizabeth A. Hart, Houston, TX (US)

Correspondence Address: FULBRIGHT & JAWORSKI, LLP, 1301 MCKINNEY, SUITE 5100, HOUSTON, TX, 77010-3095, US

(21) Appl. No.: 10/041,018

(22) Filed: Jan. 7, 2002

Related U.S. Application Data
(60) Provisional application No. 60/259,880, filed on Jan. 5, 2001.

(51) Int. Cl. C12N 1/20; C12P 7/02; C12P 5/00

(52) U.S. Cl. 435/252.3; 435/155; 435/166

(57) ABSTRACT

The present invention is directed to a unicellular organism system, such as a yeast, for producing geranylgeranyl pyrophosphate and a diterpene in vivo. The yeast cell preferably comprises an inducible nucleic acid sequence encoding geranylgeranyl pyrophosphate synthase, an inducible nucleic acid sequence encoding a soluble form of HMG-CoA reductase, a nucleic acid sequence of an allele that confers an increase in sterol metabolic flux and, in the diterpene-producing cell, a diterpene synthase.

### FIELD OF THE INVENTION

[0001] The present invention is directed to the fields of molecular biology, yeast molecular genetics and organic chemistry. More specifically, the present invention is directed to metabolically engineered yeast which produce diterpenes and diterpene precursors in vivo.

### BACKGROUND OF THE INVENTION

[0002] Metabolic engineering employs recombinant DNA technology to restructure metabolic networks of microorganisms leading to improved production and yields of natural products (Bailey, 1991) This method alters a synchronous series of transformations, defined as a pathway, to produce metabolites. Such pathway manipulations require an awareness of inherent complex regulation and a comprehensive understanding of the discrete enzymatic transformations involved. Metabolic engineering recently emerged in response to efforts made towards improving cellular function by modifying and/or introducing specific biochemical processes (Stephanopoulos, 1996).

[0003] Examples of the utility of metabolic engineering have been described and include a modified Candida utilis strain, a diploid yeast, and a modified E. coli strain, each altered to produce carotenoids (e.g., tetraterpenes). Miura et al. (1998b) and Yamano et al. (1994) describe the engineering of Escherichia coli to produce the tetraterpene lycopene by introducing recombinant Erwinia uredovora crtE, crtB and crtI genes.

[0004] Miura et al. (1998a) described a Candida utilis strain that produces lycopene, β-carotene, and astaxantin via an engineered carotenoid biosynthetic pathway that included recombinant Erwinia uredovora crtE, crtB, crtI, crtY, crtZ and crtW genes modified to contain the preferred codon usage for Candida and then expressed under the control of constitutive promoters. This strain demonstrated 0.4 mg-1.1 mg lycopene per gram dry weight of cells. Employing a similarly modified C. utilis strain comprising recombinant carotenoid biosynthetic genes from E. uredovora, Shimada et al. (1998) co-expressed the C. utilis HMG-CoA reductase catalytic domain to yield 4.3 mg lycopene/g dry weight of cells. Adding a heterozygous squalene synthase deletion, ERG9, in the same strain effected lycopene production at 7.8 mg lycopene/g dry weight of cells was produced. Wang et al. (1999) engineered Escherichia coli to generate geranylgeranyl pyrophosphate by overexpressing concomitantly E. coli isopentenyl diphosphate isomerase and Archaeoglobus fulgidus GGPP synthase. The cells were further modified to contain the Agrobacterium aurantiacum crtBIYZW gene cluster to produce the carotenoid astaxanthin. U.S. Pat. No. 5,589,581, and EP Patent Nos. EP0769551 and EP0393690, are directed to Erwinia uredovora DNA sequences which encode enzymes that participate in carotenoid biosynthesis.

[0005] U.S. Pat. No. 5,429,939 and EP Patent No. 0769551 are directed to a process for producing geranylgeranyl pyrophosphate by transforming a host with a DNA sequence consisting of an Erwinia uredovora enzyme involved in carotenoid biosynthesis and which effects transformation of farnesyl pyrophosphate (FPP) to geranylgeranyl pyrophosphate (GGPP).

[0006] Terpenes are compounds derived from isopentenyl pyrophosphate and represent a vast and structurally diverse group of natural products comprising at least 30,000 compounds displaying more than 300 ring systems. Terpenes perform crucial roles in vertebrates and include the retinoids, the geranylgeranyl and farnesyl moiety of prenylated proteins, the coenzymes A, vitamins A, D and E, cholesterol and the steroid hormones. Similarly, terpenoid hormones and pheromones are important in invertebrates. Plants control growth and development using regulatory terpenes including the gibberellins, the brassinosteroids, and abscissic acid. Many plants synthesize defense terpenoids that interfere with biological processes in potential herbivores. Some of these compounds are medicinally useful, such as Taxol, ginkgolide and artemisinin.

[0007] One terpene sub-class is the diterpenes. In plants, diterpenes serve as defense toxins, volatile defensive signals, pollinator attractants, and photoprotectants (Bohlmann et al., 1998; McGarvey and Croteau, 1995). In addition to the physiological utility imparted to their host, some diterpenes have exhibited clinical and medicinal relevance, such as the diterpene glycosides found in Pseudopterogorgia elisabethae that demonstrate anti-inflammatory activity (Look et al., 1986; Mayer et al., 1998). Generally, commercial diterpene production often begins with extraction from natural sources followed by, if necessary, synthetic manipulation. However, natural sources are limited and commercial-scale total syntheses are usually impractical. Therefore, an alternative source for the efficient and inexpensive production of diterpenes is lacking in the art.

[0008] The present invention is directed to providing a terpene, specifically a diterpene, producing system in a unicellular organism. In one embodiment a haploid S. cerevisiae strain produces significant yields of diterpene and diterpene precursors and is particularly useful as a production mechanism for these compounds.

### SUMMARY OF THE INVENTION

[0009] In an embodiment of the present invention there is a unicellular organism for producing a diterpene, comprising an exogenous nucleic acid sequence encoding a GGPP synthase; and an exogenous nucleic acid sequence encoding a diterpene synthase. In a specific embodiment, the nucleic acid encoding the diterpene synthase is SEQ ID NO:361; SEQ ID NO:362; SEQ ID NO:412; SEQ ID NO:363; SEQ ID NO:364; SEQ ID NO:365; SEQ ID NO:366; SEQ ID NO:367; SEQ ID NO:368; SEQ ID NO:369; SEQ ID NO:370; SEQ ID NO:371; SEQ ID NO:372; SEQ ID NO:373; SEQ ID NO:374; SEQ ID NO:375; SEQ ID NO:376; SEQ ID NO:377; SEQ ID NO:378; SEQ ID NO:379; SEQ ID NO:380; SEQ ID NO:381; SEQ ID NO:382 or SEQ ID NO:397.

[0010] In another specific embodiment, the GGPP synthase is SEQ ID NO:1, SEQ ID NO:2, SEQ ID NO:3, SEQ ID NO:4, SEQ ID NO:5, SEQ ID NO:6, SEQ ID NO:7, SEQ ID NO:8, SEQ ID NO:9, SEQ ID NO:10, SEQ ID NO:11, SEQ ID NO:12, SEQ ID NO:13, SEQ ID NO:14, SEQ ID NO:15, SEQ ID NO:16, SEQ ID NO:17, SEQ ID NO:18, SEQ ID NO:19, SEQ ID NO:20 or SEQ ID NO:21.

[0011] In another specific embodiment, the expression of the nucleic acid sequence encoding GGPP synthase is regulated by an inducible promoter or a constitutive promoter. In a preferred specific embodiment the inducible promoter is selected from the group consisting of GAL1, CUP1 and MET3. In another preferred specific embodiment, the constitutive promoter is selected from the group consisting of ADH and PGK.

[0012] In an additional specific embodiment the expression of the nucleic acid sequence encoding diterpene synthase is regulated by an inducible promoter or a constitutive promoter. In a preferred specific embodiment, the inducible promoter is selected from the group consisting of GAL1, CUP1 and MET3. In another preferred specific embodiment, the constitutive promoter is selected from the group consisting of ADH and PGK.

[0013] In another specific embodiment the unicellular organism further comprises an exogenous nucleic acid sequence encoding a soluble form of HMG-CoA reductase under control of a promoter operable in the unicellular organism. In a further specific embodiment, the organism produces a diterpene precursor. In another further specific embodiment, the promoter is an inducible promoter or a constitutive promoter. In a preferred specific embodiment, the inducible promoter is selected from the group consisting of GAL1, CUP1 and MET3. In another preferred specific embodiment, the constitutive promoter is selected from the group consisting of ADH and PGK.

[0014] In an additional embodiment the unicellular organism further comprises an exogenous nucleic acid sequence that confers to the organism an increase in sterol metabolic flux as compared to native sterol metabolic flux levels.

[0015] In a specific embodiment, the nucleic acid sequence encoding the geranylgeranyl pyrophosphate synthase is present on a chromosome of the unicellular organism.

[0016] In further specific embodiments, the unicellular organism is a yeast or a bacteria. In a preferred specific embodiment, the bacteria is Escherichia coli. In an additional preferred specific embodiment, the yeast is Saccharomyces.

[0017] Another embodiment of the present invention is a unicellular organism for producing a diterpene precursor, comprising an exogenous nucleic acid sequence encoding a geranylgeranyl pyrophosphate synthase under the control of an inducible promoter operable in said organism; an exogenous nucleic acid sequence encoding a soluble form of HMG-CoA reductase under control of an inducible promoter operable in said organism and an exogenous nucleic acid sequence that confers to said cell an increase in sterol metabolic flux as compared to native sterol metabolic flux levels. In a specific embodiment, the nucleic acid sequence encoding said geranylgeranyl pyrophosphate synthase is SEQ ID NO:1, SEQ ID NO:2, SEQ ID NO:3, SEQ ID NO:4, SEQ ID NO:5, SEQ ID NO:6, SEQ ID NO:7, SEQ ID NO:8, SEQ ID NO:9, SEQ ID NO:10, SEQ ID NO:11, SEQ ID NO:12, SEQ ID NO:13, SEQ ID NO:14, SEQ ID NO:15, SEQ ID NO:16, SEQ ID NO:17, SEQ ID NO:18, SEQ ID NO:19, SEQ ID NO:20 or SEQ ID NO:21. In another specific embodiment, the organism is a yeast or a bacteria.

[0018] Yet another embodiment is a unicellular organism for producing a diterpene precursor, comprising an exogenous nucleic acid sequence encoding a geranylgeranyl pyrophosphate synthase under the control of an inducible promoter operable in said organism; an exogenous nucleic acid sequence encoding a soluble form of HMG-CoA reductase under control of an inducible promoter operable in said organism and a upc2-1 nucleic acid sequence. In a specific embodiment, the nucleic acid sequence encoding said geranylgeranyl pyrophosphate synthase is SEQ ID NO:1, SEQ ID NO:2, SEQ ID NO:3, SEQ ID NO:4, SEQ ID NO:5, SEQ ID NO:6, SEQ ID NO:7, SEQ ID NO:8, SEQ ID NO:9, SEQ ID NO:10, SEQ ID NO:11, SEQ ID NO:12, SEQ ID NO:13, SEQ ID NO:14, SEQ ID NO:15, SEQ ID NO:16, SEQ ID NO:17, SEQ ID NO:18, SEQ ID NO:19, SEQ ID NO:20 or SEQ ID NO:21. In another specific embodiment, the organism is a yeast.

[0019] One embodiment of the present invention is a unicellular organism for producing a diterpene or diterpene precursor, comprising an exogenous nucleic acid sequence encoding a geranylgeranyl pyrophosphate synthase under the control of an inducible promoter operable in said organism; an exogenous nucleic acid sequence encoding a diterpene synthase under the control of an inducible promoter operable in said organism; an exogenous nucleic acid sequence encoding a soluble form of HMG-CoA reductase under control of an inducible promoter operable in said organism; and a upc2-1 nucleic acid sequence. In a specific embodiment, the nucleic acid sequence encoding a geranylgeranyl pyrophosphate synthase is SEQ ID NO:1, SEQ ID NO:2, SEQ ID NO:3, SEQ ID NO:4, SEQ ID NO:5, SEQ ID NO:6, SEQ ID NO:7, SEQ ID NO:8, SEQ ID NO: SEQ ID NO:10, SEQ ID NO:11, SEQ ID NO:12, SEQ ID NO:13, SEQ ID NO:14, SEQ ID NO:15, SEQ ID NO:16, SEQ ID NO:17, SEQ ID NO:18, SEQ ID NO:19, SEQ ID NO:20 or SEQ ID NO:21. In another specific embodiment, the nucleic acid sequence encoding said diterpene synthase is SEQ ID NO:361; SEQ ID NO:362; SEQ ID NO:412; SEQ ID NO:363; SEQ ID NO:364; SEQ ID NO:365; SEQ ID NO:366; SEQ ID NO:367; SEQ ID NO:368; SEQ ID NO:369; SEQ ID NO:370; SEQ ID NO:371; SEQ ID NO:372; SEQ ID NO:373; SEQ ID NO:374; SEQ ID NO:375; SEQ ID NO:376; SEQ ID NO:377; SEQ ID NO:378; SEQ ID NO:379; SEQ ID NO:380; SEQ ID NO:381; SEQ ID NO:382 or SEQ ID NO:397. In yet another specific embodiment, the organism is a yeast.

[0020] Another embodiment of the present invention is a unicellular organism for producing a diterpene or diterpene precursor, comprising an exogenous polynucleotide sequence encoding a polypeptide having an amino acid sequence of a geranylgeranyl pyrophosphate synthase under the control of a promoter operable in said organism; an isolated polynucleotide sequence encoding a polypeptide having an amino acid sequence of a diterpene synthase under the control of a promoter operable in said organism; an exogenous polynucleotide sequence encoding a polypeptide having an amino acid sequence of a soluble form of HMG-CoA reductase under control of a promoter operable in said organism; and an exogenous polynucleotide sequence encoding a polypeptide having an amino acid sequence of gene that confers to said organism an increase in sterol metabolic flux as compared to native sterol metabolic flux levels. In a specific embodiment, the amino acid sequence of the geranylgeranyl pyrophosphate synthase is SEQ ID NO:22, SEQ ID NO:23, SEQ ID NO:24, SEQ ID NO:25, SEQ ID NO:26, SEQ ID NO:27, SEQ ID NO:28, SEQ ID NO:29, SEQ ID NO:30, SEQ ID NO:31, SEQ ID NO:32, SEQ ID NO:33, SEQ ID NO:34, SEQ ID NO:35, SEQ ID NO:36, SEQ ID NO:37, SEQ ID NO:38, SEQ ID NO:39, SEQ ID NO:40, SEQ ID NO:41, SEQ ID NO:42, SEQ ID NO:43, SEQ ID NO:44, SEQ ID NO:45, SEQ ID NO:46, SEQ ID NO:47, SEQ ID NO:48, SEQ ID NO:49, SEQ ID NO:50, SEQ ID NO:51, SEQ ID NO:52, SEQ ID NO:53, SEQ ID NO:54, SEQ ID NO:55, SEQ ID NO:56, SEQ ID NO:57, SEQ ID NO:58, SEQ ID NO:59, SEQ ID NO:60, SEQ ID NO:61, SEQ ID NO:62, SEQ ID NO:63, SEQ ID NO:64, SEQ ID NO:65, SEQ ID NO:66, SEQ ID NO:67, SEQ ID NO:68, SEQ ID NO:69, SEQ ID NO:70, SEQ ID NO:71, SEQ ID NO:72, SEQ ID NO:73, SEQ ID NO:74, SEQ ID NO:75, SEQ ID NO:76, SEQ ID NO:77, SEQ ID NO:78, SEQ ID NO:79, SEQ ID NO:86, SEQ ID NO:81, SEQ ID NO:82, SEQ ID NO:83, SEQ ID NO:84 or SEQ ID NO:85. In another specific embodiment, the amino acid sequence of said diterpene synthase is SEQ ID NO:383; SEQ ID NO:384; SEQ ID NO:385; SEQ ID NO:386; SEQ ID NO:387; SEQ ID NO:388; SEQ ID NO:389; SEQ ID NO:390; SEQ ID NO:391; SEQ ID NO:392; SEQ ID NO:393; SEQ ID NO:394; SEQ ID NO:395; SEQ ID NO:396 or SEQ ID NO:398. In a specific embodiment, the organism is a yeast.

[0021] In another embodiment of the present invention there is a method of producing a diterpene, comprising the steps of growing a culture of cells, wherein at least one cell in said culture is the unicellular organism containing exogenous geranylgeranyl pyrophosphate synthase and diterpene synthase nucleic acid sequences, under conditions wherein said diterpene is produced; and removing said diterpene from said culture. In a specific embodiment, the growing step occurs in the presence of a polyaromatic resin. In another specific embodiment, the removal step occurs through filtration or extraction. In another specific embodiment, the removal step occurs through filtration. In an additional specific embodiment, the polyaromatic resin is in a weight-to-volume ratio of at least about 5%. In an additional specific embodiment the unicellular organism is a yeast. In another specific embodiment the unicellular organism is a bacteria. In another specific embodiment of the present invention, the nucleic acid sequence of said geranylgeranyl pyrophosphate synthase is regulated by an inducible GAL1 promoter and wherein the growing step occurs in the presence of about 2% galactose. In another specific embodiment, the nucleic acid sequence encoding said geranylgeranyl pyrophosphate synthase and said nucleic acid sequence encoding said diterpene synthase are both regulated by an inducible GAL1 promoter and wherein said growing step occurs in about 2% galactose.

[0022] In another embodiment there is a method of producing a diterpene, comprising the steps of growing a culture of cells, wherein at least one cell in said culture is the unicellular organism having an exogenous nucleic acid sequence encoding a geranylgeranyl pyrophosphate synthase, an exogenous nucleic acid sequence encoding a soluble form of HMG-CoA reductase and an exogenous nucleic acid sequence encoding a diterpene synthase, under conditions wherein said diterpene is produced; and removing the diterpene from the culture of cells. In a specific embodiment, the growing step occurs in the presence of a polyaromatic resin. In an additional specific embodiment, the polyaromatic resin is in a weight-to-volume ratio of at least about 5%. In an additional specific embodiment the unicellular organism is a yeast. In another specific embodiment the unicellular organism is a bacteria In another specific embodiment of the present invention, the nucleic acid sequence of said geranylgeranyl pyrophosphate synthase is regulated by an inducible GAL1 promoter and wherein the growing step occurs in the presence of at least about 2% galactose. In another specific embodiment, the nucleic acid sequence encoding said geranylgeranyl pyrophosphate synthase, the nucleic acid sequence encoding said HMG-CoA reductase and the nucleic acid sequence encoding the diterpene synthase are regulated by an inducible GAL1 promoters and wherein said growing step occurs in at least about 2% galactose.

[0023] In another embodiment there is a method of producing a diterpene, comprising the steps of growing a culture of cells, wherein at least one cell in said culture is the unicellular organism having an exogenous nucleic acid sequence encoding a geranylgeranyl pyrophosphate synthase, an exogenous nucleic acid sequence encoding a soluble form of HMG-CoA reductase, an exogenous nucleic acid sequence encoding a diterpene synthase and an exogenous nucleic acid sequence that confers to the organism an increase in sterol metabolic flux as compared to native sterol metabolic flux levels, under conditions wherein said diterpene is produced; and removing the diterpene from the culture of cells. In a specific embodiment, the growing step occurs in the presence of a polyaromatic resin. In an additional specific embodiment, the polyaromatic resin is in a weight-to-volume ratio of at least about 5%. In an additional specific embodiment the unicellular organism is a yeast. In another specific embodiment the unicellular organism is a bacteria. In another specific embodiment of the present invention, the nucleic acid sequence of said geranylgeranyl pyrophosphate synthase is regulated by an inducible GAL1 promoter and wherein the growing step occurs in the presence of at least about 2% galactose. In another specific embodiment, the nucleic acid sequence encoding said geranylgeranyl pyrophosphate synthase, the nucleic acid sequence encoding said HMG-CoA reductase and the nucleic acid sequence encoding the diterpene synthase are regulated by an inducible GAL1 promoters and wherein said growing step occurs in at least about 2% galactose.

[0024] In another embodiment there is a method of producing a diterpene precursor, comprising the steps of growing a culture of cells, wherein at least one cell in said culture is the unicellular organism having an exogenous nucleic acid sequence encoding a geranylgeranyl pyrophosphate synthase, an exogenous nucleic acid sequence encoding a soluble form of a HMG-CoA reductase, and an exogenous nucleic acid sequence that confers to the cell an increase in sterol metabolic flux as compared to native sterol metabolic flux levels, under conditions wherein said diterpene is produced; and removing the diterpene from the culture of cells. In a specific embodiment, the nucleic acid sequence that confers to said cell an increase in sterol metabolic flux is the upc2-1 allele. In a specific embodiment, the growing step occurs in the presence of a polyaromatic resin. In an additional specific embodiment, the polyaromatic resin is in a weight-to-volume ratio of at least about 5%. In an additional specific embodiment the unicellular organism is a yeast or a bacteria. In another specific embodiment of the present invention, the nucleic acid sequence of said geranylgeranyl pyrophosphate synthase is regulated by an inducible GAL1 promoter and wherein the growing step occurs in the presence of at least about 2% galactose. In another specific embodiment, the nucleic acid sequence encoding said geranylgeranyl pyrophosphate synthase and the nucleic acid sequence encoding the soluble form of the HMG-CoA reductase are regulated by an inducible GAL1 promoters and wherein said growing step occurs in at least about 2% galactose.

[0025] In another embodiment there is a method of producing a diterpene precursor, comprising the steps of growing a culture of cells, wherein at least one cell in said culture is the unicellular organism having an exogenous nucleic acid sequence encoding a geranylgeranyl pyrophosphate synthase, an exogenous nucleic acid sequence encoding a soluble form of a HMG-CoA reductase, and an exogenous nucleic acid sequence that confers to the cell an increase in sterol metabolic flux as compared to native sterol metabolic flux levels, under conditions wherein said diterpene precursor is produced. In a specific embodiment, the nucleic acid sequence that confers to said cell an increase in sterol metabolic flux is the upc2-1 allele. In a specific embodiment, the growing step occurs in the presence of a polyaromatic resin. In an additional specific embodiment, the polyaromatic resin is in a weight-to-volume ratio of at least about 5%. In an additional specific embodiment the unicellular organism is a yeast. In another specific embodiment the unicellular organism is a bacteria. In another specific embodiment of the present invention, the nucleic acid sequence of said geranylgeranyl pyrophosphate synthase is regulated by an inducible GAL1 promoter and wherein the growing step occurs in the presence of at least about 2% galactose. In another specific embodiment, the nucleic acid sequence encoding said geranylgeranyl pyrophosphate synthase, the nucleic acid sequence encoding the soluble form of the HMG-CoA reductase and the nucleic acid sequence encoding the diterpene synthase are regulated by an inducible GAL1 promoters and wherein said growing step occurs in at least about 2% galactose.

[0026] A method of producing a diterpene or diterpene precursor, comprising the steps of growing a culture of cells, wherein at least one cell in said culture is the unicellular organism having an exogenous polynucleotide sequence encoding a polypeptide having an amino acid sequence of a geranylgeranyl pyrophosphate synthase under the control of a promoter operable in said organism; an exogenous polynucleotide sequence encoding a polypeptide having an amino acid sequence of a diterpene synthase under the control of a promoter operable in said organism; an exogenous polynucleotide sequence encoding a polypeptide having an amino acid sequence of a soluble form of HMG-CoA reductase under control of a promoter operable in said organism; and an exogenous polynucleotide sequence encoding a polypeptide having an amino acid sequence of a gene that confers to said organism an increase in sterol metabolic flux as compared to native sterol metabolic flux levels, under conditions wherein said diterpene or diterpene precursor is produced.

[0027] In another embodiment of the present invention there is a method of producing a diterpene, comprising the steps of growing a culture of cells, wherein the culture comprises at least one cell having an exogenous nucleic acid sequence encoding a geranylgeranyl pyrophosphate synthase under control of a promoter operable in the cell, an exogenous nucleic acid sequence encoding a diterpene synthase under control of a promoter operable in the cell, an exogenous nucleic acid sequence encoding a soluble form of HMG-CoA reductase under control of a promoter operable in the cell and a nucleic acid sequence encoding a gene that confers an increase in sterol metabolic flux in the cell as compared to native sterol metabolic flux levels, wherein a metabolic pathway in the cell comprises a process which converts farnesyl pyrophosphate to a triterpene or sterol, wherein the process is modified and under conditions wherein said diterpene is produced; and removing said diterpene from the culture. In a specific embodiment, the modification of the metabolic pathway occurs at an enzyme selected from the group consisting of squalene synthase, squalene epoxidase, lanosterol synthase, or a combination thereof. In another specific embodiment, the modification is the result of an alteration in a nucleic acid sequence which encodes the enzyme, an alteration in expression of a nucleic acid sequence which encodes the enzyme, an alteration in translation or proteolysis of the enzyme, or a combination thereof.

[0028] In another embodiment of the present invention there is a method of producing a diterpene precursor, comprising the steps of growing a culture of cells, wherein the culture comprises at least one cell comprising an exogenous nucleic acid sequence encoding a geranylgeranyl pyrophosphate synthase, an exogenous nucleic acid sequence encoding a soluble form of a HMG-CoA reductase, and an exogenous nucleic acid sequence encoding a gene that confers to the cell an increase in sterol metabolic flux as compared to native sterol metabolic flux levels, and wherein a metabolic pathway in the cell comprises a process which converts farnesyl pyrophosphate to a triterpene or sterol, wherein the process is modified and under conditions wherein said diterpene is produced; and removing said diterpene from the culture. In a specific embodiment, the modification of the metabolic pathway occurs at an enzyme selected from the group consisting of squalene synthase, squalene epoxidase, lanosterol synthase, or a combination thereof. In another specific embodiment, the modification is the result of an alteration in a nucleic acid sequence which encodes the enzyme, an alteration in expression of a nucleic acid sequence which encodes the enzyme, an alteration in translation or proteolysis of the enzyme, or a combination thereof.

[0029] In another embodiment of the present invention there is a method of producing a diterpene or a diterpene precursor, comprising the steps of growing a culture of cells, wherein the culture comprises at least one cell comprising an exogenous nucleic acid sequence encoding a polypeptide of an amino acid sequence of a geranylgeranyl pyrophosphate synthase, an exogenous nucleic acid sequence encoding a polypeptide of an amino acid sequence of a a diterpene synthase, an exogenous nucleic acid sequence encoding a polypeptide of an amino acid sequence of a soluble form of a HMG-CoA reductase and a upc2-1 amino acid sequence, wherein a metabolic pathway in the cell comprises a process which converts farnesyl pyrophosphate to a triterpene or sterol, wherein the process is modified and under conditions wherein said diterpene or diterpene precursor is produced. In a specific embodiment, the modification of the metabolic pathway occurs at an enzyme selected from the group consisting of squalene synthase, squalene epoxidase, lanosterol synthase, or a combination thereof. In another specific embodiment, the modification is the result of an alteration in a nucleic acid sequence which encodes the enzyme, an alteration in expression of a nucleic acid sequence which encodes the enzyme, an alteration in translation or proteolysis of the enzyme, or a combination thereof.

[0030] In another embodiment of the present invention there is a method of producing a diterpene, comprising the steps of growing a culture of cells, wherein the culture comprises at least one cell having an exogenous nucleic acid sequence encoding a geranylgeranyl pyrophosphate synthase under control of a promoter operable in the cell, an exogenous nucleic acid sequence encoding a diterpene synthase under control of a promoter operable in the cell, an exogenous nucleic acid sequence encoding a soluble form of HMG-CoA reductase under control of a promoter operable in the cell and an exogenous nucleic acid sequence encoding a gene that confers an increase in sterol metabolic flux in the cell as compared to native sterol metabolic flux levels, and wherein a prenyltransferase is modified, under conditions wherein the diterpene is produced. In a specific embodiment, the prenyltransferase is protein farnesyltransferase, protein geranylgeranyltransferase I alpha subunit, protein geranylgeranyltransferase I beta subunit, protein geranylgeranyltransferase II alpha subunit, protein geranylgeranyltransferase II beta subunit, or a combination thereof. In another specific embodiment, the modification is the result of an alteration in a nucleic acid sequence which encodes said enzyme, an alteration in expression of a nucleic acid sequence which encodes the enzyme, an alteration in translation or proteolysis of the enzyme, or a combination thereof.

[0031] In another embodiment of the present invention there is a method of producing a diterpene precursor, comprising the steps of growing a culture of cells, wherein the culture comprising an exogenous nucleic acid sequence encoding a geranylgeranyl pyrophosphate synthase, an exogenous nucleic acid sequence encoding a soluble form of a HMG-CoA reductase, and an exogenous nucleic acid sequence encoding a gene that confers to the cell an increase in sterol metabolic flux as compared to native sterol metabolic flux levels, and wherein a prenyltransferase is modified, under conditions wherein the diterpene precursor is produced. In an additional specific embodiment, the prenyltransferase is protein farnesyltransferase, protein geranylgeranyltransferase I alpha subunit, protein geranylgeranyltransferase I beta subunit, protein geranylgeranyltransferase II alpha subunit, protein geranylgeranyltransferase II beta subunit, or a combination thereof. In another specific embodiment, the modification is the result of an alteration in a nucleic acid sequence which encodes said enzyme, an alteration in expression of a nucleic acid sequence which encodes the enzyme, an alteration in translation or proteolysis of the enzyme, or a combination thereof.

[0032] In another embodiment of the present invention there is a method of producing a diterpene, comprising the steps of growing a culture of cells, wherein the cell comprises an exogenous nucleic acid sequence encoding a geranylgeranyl pyrophosphate synthase under control of a promoter operable in the cell, an exogenous nucleic acid sequence encoding a diterpene synthase under control of a promoter operable in the cell, an exogenous nucleic acid sequence encoding a soluble form of HMG-CoA reductase under control of a promoter operable in the cell and an exogenous nucleic acid sequence encoding a gene that confers an increase in sterol metabolic flux in the cell as compared to native sterol metabolic flux levels, and wherein a hexaprenylpyrophosphate synthetase is modified, under conditions wherein the geranylgeranyl pyrophosphate is produced. In another specific embodiment, the modification is the result of an alteration in a nucleic acid sequence which encodes said enzyme, an alteration in expression of a nucleic acid sequence which encodes the enzyme, an alteration in translation or proteolysis of the enzyme, or a combination thereof.

[0033] In another embodiment of the present invention there is a method of producing a diterpene precursor, comprising the steps of growing a culture of cells, wherein at least one cell comprises an exogenous nucleic acid sequence encoding a geranylgeranyl pyrophosphate synthase, an exogenous nucleic acid sequence encoding a soluble form of a HMG-CoA reductase, and an exogenous nucleic acid sequence encoding a gene that confers to the cell an increase in sterol metabolic flux as compared to native sterol metabolic flux levels, and wherein a hexaprenylpyrophosphate synthetase is modified, under conditions wherein the diterpene is produced. In another specific embodiment, the modification is the result of an alteration in a nucleic acid sequence which encodes said enzyme, an alteration in expression of a nucleic acid sequence which encodes the enzyme, an alteration in translation or proteolysis of the enzyme, or a combination thereof.

[0034] In another embodiment of the present invention there is a method of isolating a diterpene synthase, comprising the steps of growing a plurality of cells, wherein the cell comprises an exogenous nucleic acid sequence encoding a geranylgeranyl pyrophosphate synthase, an exogenous nucleic acid sequence encoding a soluble form of a HMG-CoA reductase, and an exogenous nucleic acid sequence encoding a gene that confers to the cell an increase in sterol metabolic flux as compared to native sterol metabolic flux levels, in the presence of a polyaromatic resin to make a cell/resin mixture, wherein at least one of said cells further comprises at least one isolated and purified nucleic acid sequence of a yeast expression library, wherein the expression of said nucleic acid sequence of the yeast expression library is regulated by an inducible promoter, under conditions wherein said expression is induced; filtering said cell/resin mixture; extracting said cell/resin mixture to produce an eluent; analyzing said eluent by a screening method, wherein said screening method is selected from the group consisting of chromatography, spectroscopy, or a combination thereof, and wherein said screening method identifies said nucleic acid sequence as encoding the diterpene synthase.

[0035] Other and further objects, features, and advantages would be apparent and eventually more readily understood by reading the following specification and be reference to the accompanying drawings forming a part thereof, or any examples of the presently preferred embodiments of the invention given for the purpose of the disclosure.

### BRIEF DESCRIPTION OF THE FIGURES

[0036] FIG. 1 illustrates a generic structure of isoprene.

[0037] FIG. 2 illustrates de novo sterol biosynthesis native to Saccharomyces cerevisiae.

[0038] FIG. 3 illustrates terpene biosynthetic pathways resulting from sterol intermediates.

[0039] FIG. 4 illustrates diterpene and diterpene production in wild-type yeast.

[0040] FIG. 5 illustrates GGPP and abietadiene production in yeast comprising an overexpressed BTS1 nucleic acid sequence.

[0041] FIG. 6 illustrates the reaction catalyzed by HMG-CoA reductase (HMGR).

[0042] FIG. 7 demonstrates the increase in diterpene yield obtained with overexpression of a nucleic acid encoding HMG-CoA reductase.

[0043] FIG. 8 illustrates the amount of geranylgeraniol production in a cell grown in 2% galactose having an overexpressed BTS1 and HMG-CoA reductase, with and without an overexpressed diterpene synthase.

[0044] FIG. 9 illustrates the catalytic mechanism of a diterpene cyclase.

### DETAILED DESCRIPTION OF THE INVENTION

[0045] It will be readily apparent to one skilled in the art that various embodiments and modifications may be made in the invention disclosed herein without departing from the scope and spirit of the invention.

[0046] As used in the specification, “a” or “an” may mean one or more. As used in the claim(s), when used in conjunction with the word “comprising”, the words “a” or “an” may mean one or more than one. As used herein “another” may mean at least a second or more.

[0047] The technology of the present invention is related to the invention described in the U.S. patent application entitled, “Ginkgo biloba Levopimaradiene Synthase” filed on the same day and incorporated by reference herein.

[0048] I. Definitions

[0049] The term “diterpene” as used herein is defined as a terpene molecule having four isoprene units (C₂₀ compounds).

[0050] The term “diterpene precursor” as used herein is defined as a metabolite in a pathway that serves as a synthetic or biosynthetic precursor to the production of a diterpene. A preferred diterpene precursor is geranylgeranyl pyrophosphate but also includes farnesyl pyrophosphate and isopentenyl pyrophosphate.

[0051] The term “diterpene synthase” as used herein is defined as an enzyme that catalyzes biosynthesis of a diterpene. In a specific embodiment, the term “diterpene cyclase” is used herein to refer to a diterpene synthase that effects a cyclization reaction to produce a diterpene having at least one cyclic structure. A non-limiting example of a diterpene comprising three cyclic structures is abietadiene.

[0052] The term “downregulated” as used herein refers to the state of a metabolic pathway being altered in which a step or process in the pathway is decreased or downregulated, such as in activity of an enzyme or expression of a nucleic acid sequence, respectively. In a specific embodiment, the modification is the result of an alteration in a nucleic acid sequence which encodes an enzyme in the pathway, an alteration in expression of a nucleic acid sequence which encodes an enzyme in the pathway, or an alteration in translation or proteolysis of an enzyme in the pathway, or a combination thereof. A skilled artisan recognizes that there are commonly used standard methods in the art to obtain the alterations, such as by mutation.

[0053] The terms “exogenous nucleic acid sequence” and “exogenous polynucleotide” refer to a nucleic acid sequence or polynucleotide that has been prepared and provided to a cell. In one aspect, the nucleic acid sequence has been isolated and purified by methods well-known in the art and, optionally, modified. This nucleic acid sequence is then provided to a cell employing methods known in the art, thereby producing a recombinant cell. In another aspect, the terms refer to a non-native nucleic acid sequence that has been provided to a cell. For example, an allele that confers an increase in a flux of a metabolic pathway has been added to the cell of the present invention by conventional methods such as genetic cross, and, thus, represents an exogenous sequence as compared to the native cell.

[0054] The term “GGPP” as used herein is defined as geranylgeranyl pyrophosphate and employed interchangably in the art with geranlygeranyl diphosphate (e.g., “GGDP”). The acyclic carbon structure possesses four double bonds, which preferably at least one is in the E configuration.

[0055] The term “HMGR” as used herein is defined as HMG-CoA reductase. A skilled artisan is aware that HMGR catalyzes the reduction of 3-hydroxy-3-methylglutaryl Coenzyme A to mevalonate, which is interchangeably referred to as mevalonic acid (see FIG. 6).

[0056] The term “isoprene” as used herein is defined as a C₅ chemical unit as shown in FIG. 1.

[0057] The term “inducer” as used herein is defined as a compound, molecule or structure such as a promoter, that controls and effects a process. Specifically, one inducer of the present invention is galactose, which controls expression of a nucleic acid sequence of the present invention.

[0058] The terms “modified” or “modification” as used herein refer to the state of a metabolic pathway being altered in which a step or process in the pathway is decreased or downregulated or increased or upregulated, such as in activity of an enzyme or expression of a nucleic acid sequence. In a specific embodiment, the modification is the result of an alteration in a nucleic acid sequence which encodes an enzyme in the pathway, an alteration in expression of a nucleic acid sequence which encodes an enzyme in the pathway, or an alteration in translation or proteolysis of an enzyme in the pathway, or a combination thereof. Further, the modification is the result of introducing or exogenously providing to a cell having a metabolic pathway a nucleic acid sequence the effects a desired modification of the pathway. A skilled artisan recognizes that there are commonly used standard methods in the art to obtain the alterations, such as by mutation.

[0059] The term “monoterpene” as used herein is defined as a terpene having two isoprene units (C₁₀ compounds), wherein the monoterpene is a metabolite of geranyl diphosphate or geranyl pyrophosphate.

[0060] The term “sesquiterpene” as used herein is defined as a terpene having three isoprene units (C₁₅ compounds), wherein the sesquiterpene is a metabolite of farnesyl diphosphate or farnesyl pyrophosphate.

[0061] The term “soluble form” as used herein is defined as a form, such as an amino acid sequence, that demonstrates HMG-CoA reductase activity. In a specific embodiment, the soluble form contains no more than about three transmembrane domains.

[0062] The term “terpene” as used herein is defined a material comprising isopentene (also called isoprene) units. The structure of the isoprene unit comprising terpenes is shown in FIG. 1.

[0063] The term “triterpene” as used herein is defined as a terpene having six isoprene units (C₃₀ compounds), wherein the triterpene is a metabolite of squalene or oxidosqualene.

[0064] The term “under conditions wherein said diterpene is produced” as used herein is defined as an environment wherein a diterpene is produced, wherein such parameters as temperature, such as between about 28° C. and about 32° C., but preferably about 30° C., growth media content, which is well known in the art, availability of an inducer for an inducible promoter, and the like are provided to produce the diterpene.

[0065] The term “under conditions wherein said geranylgeranyl pyrophosphate is produced” and “under conditions wherein said GGPP is produced” as used herein is defined as an environment wherein geranylgeranyl pyrophosphate is produced. In specific embodiments, the conditions includes cultivation temperature, such as between about 28° C. and about 32° C., but preferably about 30° C. unless an alteration comprising a temperature-sensitive mutation has been employed, growth media content, which is well known in the art, availability of an inducer for an inducible promoter, and the like are provided to produce the geranylgeranyl pyrophosphate (GGPP).

[0066] The term “under conditions wherein said geranylgeraniol is produced” and “under conditions wherein said GGOH is produced” as used herein is defined as an environment wherein geranylgeraniol is produced. In specific embodiments, the conditions includes cultivation temperature, such as between about 28° C. and about 32° C., but preferably about 30° C. unless an alteration comprising a temperature-sensitive mutation has been employed, growth media content, which is well known in the art, availability of an inducer for an inducible promoter, and the like are provided to produce the geranylgeraniol (GGOH).

[0067] The term “unicellular organism” as used herein is defined as a non-human organism which is a single cell and is incapable of development into a multicellular organism. In a specific embodiment, this includes bacteria, such as Escherichia coli, and yeast, such as Saccharomyces. Preferably the unicellular organism comprises an isoprenoid biosynthetic pathway and/or a sterol biosynthetic pathway.

[0068] The term “upregulated” as used herein is defined as increased in expression of a particular nucleic acid sequence over native or wild type expression levels. The upregulation results from, for example, an increase in transcription of the sequence, an increase in stability of a messenger RNA of the sequence, a combination thereof, or through other means known in the art which increase levels of expression levels of a nucleic acid sequence. In a specific embodiment, the increase in expression is the result of a promoter operatively linked to the nucleic acid sequence which is not native to the nucleic acid sequence. In another specific embodiment, the increase in expression is the result of an inducible or constitutive promoter which regulates the nucleic acid sequence. In another specific embodiment, the increase in a cognate protein level of the nucleic acid sequence is the result of a promoter operatively linked to the amino acid sequence which is not native to the amino acid sequence.

[0069] II. The Present Invention

[0070] The present invention is directed to recombinant yeast, such as Saccharomyces, which is modified at at least one step in the sterol biosynthetic pathway to produce high levels of diterpene hydrocarbon(s) or a diterpene precursor such as GGPP. Yeast are readily genetically manipulated, and the metabolism of its major sterol, ergosterol, is well understood. Therefore, the yeast serve as a general production system, particularly because the yeast system is uniquely adaptable to further modify and biosynthesize other terpenes (including monoterpenes, sesquiterpenes, diterpenes and triterpenes) in vivo.

[0071] Another embodiment of the present invention is a recombinant bacteria, such as E. coli, which is modified at at least one step in the isoprenoid biosynthetic pathway to produce high levels of diterpene hydrocarbon(s) or a diterpene precursor such as GGPP. Bacteria are readily genetically manipulated and cultivated, and the isoprenoid metabolism of hopanoids, the prokaryotic cellular analog to sterols, is understood to comprise production in vivo of GGPP that is not a commecially feasible level.

[0072] Standard methods and reagents in the field of yeast molecular genetics, particularly regarding Saccharomyces cerevisiae, are well known in the art. References for such methods include Methods in Yeast Genetics, 2000 Edition: A Cold Spring Harbor Laboratory Course Manual (Burke et al., 2000) and Current Protocols in Molecular Biology, Chapter 13 (Ausubel et al., 1994), both incorporated by reference herein. A skilled artisan is aware that Saccharomyces is the yeast of choice, which includes many known species such as S. cerevisiae, S. italicus, S. oviformis, S. capensis, S. chevalieri, S. douglasii, S. paradoxus, S. cariocanus, S. kudriavzevii, S. mikatae, S. bayanus and S. pastorianus. In another embodiment, it is contemplated that filamentous fungi, such as Aspergillus, is used instead of a unicellular organism as defined herein. However, a skilled artisan recognizes that filamentous fingi, which normally develop into a multicellular septate organism, are unicellular in a pre-septate developmental stage.

[0073] In a preferred embodiment, the diterpene producing strain overexpresses a geranylgeranyl pyrophosphate synthase, overexpresses a diterpene synthase, overexpresses a soluble form of 3-hydroxy-3-methylglutaryl Co-A reductase, and contains a nucleic acid sequence that encodes a gene that confers an increase in sterol metabolic flux to the cell as compared to native sterol metabolic flux levels. That is, coexpression of a 3-hydroxy-3-methylglutaryl Co-A reductase or other enzymes that yield geranylgeranyl pyrophosphate allows production of geranylgeranyl pyrophosphate metabolites which include geranylgeraniol, diterpene hydrocarbon(s), further metabolites and related compounds. One non-limiting example of a nucleic acid sequence the encodes a gene that confers an increase in sterol metabolic flux is upc2-1. Genes that effect similar increases in sterol metabolic flux to the cell are contemplated as their effect is expected to increase the amount of diterpene produced in the recombinant cell. Incubation in the presence of a polyaromatic resin allows the product(s) to be adsorbed extracellularly, which greatly simplifies recovery and increases isolated yields. In specific embodiments, one or more additional enzymes are employed to further metabolize the diterpene synthase product (i.e., an oxidoreductase). In a preferred embodiment, the engineered unicellular organism is grown in the presence of at least about 5% (w/v) sterile polyaromatic resin-supplemented media.

[0074] A yeast cell of the present invention to produce a diterpene precursor preferably has at least one of the following: an exogenous polynucleotide encoding a polypeptide of amino acid sequence of a geranylgeranyl pyrophosphate synthase under the control of a promoter operable in the yeast, an exogenous nucleic acid sequence encoding a polypeptide of amino acid sequence of a HMG-CoA reductase under control of a promoter operable in the yeast, and/or an exogenous polynucleotide encoding a polypeptide that confers an increase in sterol metabolic flux to the cell as compared to native sterol metabolic flux levels. It is understood that a yeast cell that is desired to produce diterpenes in vivo must further comprise an exogenous polynucleotide encoding a polypeptide of amino acid sequence of a diterpene synthase under the control of a promoter operable in the yeast.

[0075] In specific embodiments, the yeast cell comprises a yeast geranylgeranyl pyrophosphate synthase, a diterpene synthase, a truncated form of HMG-CoA reductase, and a nucleic acid sequence encoding a gene that confers an increase in sterol metabolic flux. The geranylgeranyl pyrophosphate synthase originated in other organisms are also contemplated in specific embodiments. In one embodiment, a yeast cell is manipulated by standard molecular genetics methods to additionally contain BTS1, and/or the truncated HMG-CoA reductase, and/or the nucleic acid sequence that confers an increase in sterol metabolic flux. The nucleic acids are chromosome bound to minimize antibiotic selection requirements or are episomally borne and maintained in the cell by a selection or a functional means. Furthermore, the nucleic acid sequences of the present invention are preferably regulated by an inducible promoter, such as GAL1, CUP1 or MET3, to provide a means of external control of GGPP biosynthesis. In an alternative embodiment, a constitutive promoter such as the PGK promoter or the ADH promoter is utilized. In a specific embodiment, the constitutive promoter is employed to control expression of the diterpene synthase. In a preferred embodiment, the constitutive promoters are strong promoters.

[0076] In the specific embodiment wherein one or more nucleic acid sequences are included in the yeast cell to modify GGPP and/or utilize GGPP as a substrate for subsequent syntheses, this sequence(s) is contained on a multicopy plasmid bearing a selection means. In the specific embodiment wherein abietadiene is generated from the GGPP biosynthesis pathway, the abietadiene cyclase (e.g., diterpene synthase) is plasmid-borne within the cell and selected for by standard means.

[0077] In a specific embodiment, a normative nucleic acid sequence is incorporated into a yeast cell. Advantages of employing native nucleic acid and amino acid sequences includes, for example, cellular recognition of the recombinant structure. However, as a skilled artisan is aware, the cellular recognition has a disadvantage in that, for example, the recombinant structure is a highly regulated structure in the cell. Thus, accumulating the structure in vivo effects metabolic and regulatory mechanisms that are adverse to diterpene and diterpene precursor production.

[0078] A skilled artisan is aware that in the specific embodiments wherein there is variability in isolated and/or production yields, yet still highly improved over yields generated in the absence of a GGPP synthase, a soluble form of HMG-CoA reductase, and a nucleic acid encoding a gene that confers an increase in the sterol metabolic flux. This variability is due, for example, to the initiation of native regulatory mechanisms, the accumulation of hydrolyzed diterpene precursor, the transportation mechanisms responsible for molecular exportation, and/or other unknown mechanistic events controlling sterol biosynthesis.

[0079] In the specific embodiment wherein a plant nucleic acid sequence is utilized, a skilled artisan is aware that, for instance, such as is required by E. coli, a plastidyl targeting sequence is be identified and removed. If the targeting sequence does not occur, the structural products are vulnerable to incorporation into inclusion bodies. However, the significant surplus of precursor generated by the compositions and methods of the present invention allow use of the full length plant nucleic acid sequence, which is a significant advantage of the present invention. In particular, this is advantageous in the methods of the present invention wherein a diterpene synthase is identified by enzymatic activity in the compositions of the present invention.

[0080] Alternatively, a unicellular organism comprising an isolated polypeptide encoding an amino acid sequence of a GGPP synthase, the soluble form of HMG-CoA reductase, the diterpene synthase, a gene that confers an increase in sterol metabolic flux, the squalene synthase, the hexaprenylpyrophosphate synthetase and/or the prenyltransferase are within the scope of the present invention. Non-limiting examples of amino acid sequences are provided herein.

[0081] In other embodiments, a modification is made that decreases, downregulates, diminishes or removes biosynthetic pathways that compete for GGPP bioavailability. In another specific embodiment, a hexaprenylpyrophosphate synthetase is modified to increase FPP flux into the engineered GGPP biosynthesis pathway. An example of a hexaprenylpyrophosphate synthetase is COQ1 (GenBank Accession No. J05547; SEQ ID NO:401). Hexaprenylpyrophosphate is the committed step of pathways which produce dolichols and ubiquinones. In an additional specific embodiment, a prenyltransferase is modified. Prenyltransferases are well known in the art. In a specific embodiment, the site of inhibition is protein farnesyltransferase (such as STE14; GenBank Accession No. L15442 (SEQ ID NO:402) or GenBank Accession No. L07952 (SEQ ID NO:403)), protein geranylgeranyltransferase I alpha subunit (such as CDC43; GenBank Accession No. M31114; SEQ ID NO:404), protein geranylgeranyltransferase I beta subunit (such as RAM2; GenBank Accession No. M88584; SEQ ID NO:405), protein geranylgeranyltransferase II alpha subunit (such as BET2; GenBank Accession No. M26597; SEQ ID NO:406), protein geranylgeranyltransferase II beta subunit (such as BET4; GenBank Accession No. U14132; SEQ ID NO:407), or a combination thereof.

[0082] A skilled artisan is aware of sequence repositories, such as GenBank, to obtain nucleic acid and amino acid sequences utilized in the present invention. Examples of geranylgeranyl pyrophosphate synthase nucleic acid sequences for the present invention include the following: U31632 (SEQ ID NO:1); AF049658 (SEQ ID NO:2); AK025139 (SEQ ID NO:3); AB000835 (SEQ ID NO:4); AJ276129 (SEQ ID NO:5); AB034250 (SEQ ID NO:6); AB034249 (SEQ ID NO:7); AW132388 (SEQ ID NO:8); AW034766 (SEQ ID NO:9); AI496168 (SEQ ID NO:10); AF081514 (SEQ ID NO:11); AF020041 (SEQ ID NO:12); X98795 (SEQ ID NO:13); X92893 (SEQ ID NO:14); X80267 (SEQ ID NO:15); L37405 (SEQ ID NO:16); U15778 (SEQ ID NO:17); L40577 (SEQ ID NO:18); M87280 (SEQ ID NO:19); L25813 (SEQ ID NO:20); and AF049659 (SEQ ID NO:21). A skilled artisan is aware that sequences unrelated to geranylgeranyl pyrophosphate synthase in those sequences which comprise large regions of the genome of a particular organism are not within the scope of the invention. In a preferred embodiment, SEQ ID NO:1 is utilized as a geranylgeranyl pyrophosphate synthase nucleic acid sequence in the cell of the invention.

[0083] Examples of geranylgeranyl pyrophosphate synthase amino acid sequences for the present invention include the following: AAA83262.1 (SEQ ID NO:22); AAC05595.1 (SEQ ID NO:23); AAC05273.1 (SEQ ID NO:24); NP_{—}043281.1 (SEQ ID NO:25); BAB18334.1 (SEQ ID NO:26); AAC68232.1 (SEQ ID NO:27); CAC12434.1 (SEQ ID NO:28); BAB02385.1 (SEQ ID NO:29); CAB94793.1 (SEQ ID NO:30); AAF38891.1 (SEQ ID NO:31); BAA23157.1 (SEQ ID NO:32); BAA19583.1 (SEQ ID NO:33); CAB89115.1 (SEQ ID NO:34); AAD12206.1 (SEQ ID NO:35); AAD08933.1 (SEQ ID NO:36); CAB80510 (SEQ ID NO:37); CAB80347.1 (SEQ ID NO:38); CAB38744.1 (SEQ ID NO:39); BAA16690.1 (SEQ ID NO:40); AAD38295.1 (SEQ ID NO:41); BAA86285.1 (SEQ ID NO:42); BAA86284.1 (SEQ ID NO:43); CAB53152.1 (SEQ ID NO:44); CAB56064.1 (SEQ ID NO:45); BAA77251 (SEQ ID NO:46); CAB16803.1 (SEQ ID NO:47); CAB37502.1 (SEQ ID NO:48); AAD16018.1 (SEQ ID NO:49); AAC77874.1 (SEQ ID NO:50); CAA17477.1 (SEQ ID NO:51); AAC06913.1 (SEQ ID NO:52); CAA67330.1 (SEQ ID NO:53); AAB67731.1 (SEQ ID NO:54); CAA63486.1 (SEQ ID NO:55); CAA56554.1 (SEQ ID NO:56); AAA96328.1 (SEQ ID NO:57); AAA91949.1 (SEQ ID NO:58); AAA86688.1 (SEQ ID NO:59); AAA81879.1 (SEQ ID NO:60); AAA81312.1 (SEQ ID NO:61); AAA32797.1 (SEQ ID NO:62); BAB01876 (SEQ ID NO:63); BAA23157 (SEQ ID NO:64); AAD43148 (SEQ ID NO:65); NP_{—}043281 (SEQ ID NO:66); BAB18334 (SEQ ID NO:67); E81650 (SEQ ID NO:68); T36967 (SEQ ID NO:69); S76966 (SEQ ID NO:70); A72041 (SEQ ID NO:71); T02429 (SEQ ID NO:72); S74538 (SEQ ID NO:73); S71230 (SEQ ID NO:74); S71231 (SEQ ID NO:75); AAC05595 (SEQ ID NO:76); AAC05273 (SEQ ID NO:77); BAB02387 (SEQ ID NO:78); BAB01936 (SEQ ID NO:79); AAF39709 (SEQ ID NO:80); BAA23158 (SEQ ID NO:81); E70365 (SEQ ID NO:82); S49625 (SEQ ID NO:83); P34802 (SEQ ID NO:84); and P80042 (SEQ ID NO:85). In a preferred embodiment, SEQ ID NO:22 is utilized as a geranylgeranyl pyrophosphate synthase amino acid sequence in the cell.

[0084] One non-limiting example of a gene that confers an increase to sterol metabolic flux as compared to native sterol metabolic flux levels is the upc2-1 allele. The upc2-1 allele comprises a guanine to adenine transition in the open reading frame designated YDR213W on chromosome IV (Leak et al., 1999; incorporated by reference herein in its entirety). The nucleic acid sequence is known and/or obtained through GenBank Accession No. Z68194 (SEQ ID NO:399), and Leak et al. (1999) describe the mutations associated with the upc2-1 allele. Incorporation of the upc2-1 allele conferred an increase in sterol metabolic flux as compared to native sterol metabolic flux levels, and thus, demonstrates that other such genes that confer the same biological activity, e.g., increase sterol metabolic flux levels, are expected to increase production in vivo of a diterpene and a diterpene precursor.

[0085] In a preferred embodiment of the present invention, a soluble form of HMG-CoA reductase is utilized. A skilled artisan is aware that this requires removal of hydrophobic sequences responsible for conferring insolubility to the gene product, such as transmembrane domains, and is furthermore aware of standard methods to achieve such removal from the sequence. Examples of HMG-CoA reductase nucleic acid sequences, which in specific embodiments may be altered to achieve solubility of the reductase for the present invention, include the Saccharomyces cerevisiae open reading frame found on chromosome XIII at locus YML075C (SEQ ID NO:86); NM_{—}000859 (SEQ ID NO:87); X00494 (SEQ ID NO:88); AF273765 (SEQ ID NO:89); AF273764 (SEQ ID NO:90); AF273763 (SEQ ID NO:91); AF273762 (SEQ ID NO:92); AF273761 (SEQ ID NO:93); AF273760 (SEQ ID NO:94); AF273759 (SEQ ID NO:95); AF273758 (SEQ ID NO:96); AF273757 (SEQ ID NO:97); AF273756 (SEQ ID NO:98); AF273755 (SEQ ID NO:99); AF273754 (SEQ ID NO:100); AF290098 (SEQ ID NO:101); AF290096 (SEQ ID NO:102); AF290090 (SEQ ID NO:103); AF290088 (SEQ ID NO:104); AF290086 (SEQ ID NO:105); AF071750 (SEQ ID NO:106); AB037907 (SEQ ID NO:107); AF155593 (SEQ ID NO:108); X58370 (SEQ ID NO:109); AF162705 (SEQ ID NO:110); AF159136 (SEQ ID NO:111); AF159138 (SEQ ID NO:112); AB015627 (SEQ ID NO:113); AB015626 (SEQ ID NO:114); AV374599 (SEQ ID NO:115); AV317420 (SEQ ID NO:116); AV317328 (SEQ ID NO:117); AV317132 (SEQ ID NO:118); AV277976 (SEQ ID NO:119); AV259312 (SEQ ID NO:120); AV237573 (SEQ ID NO:121); AF142473 (SEQ ID NO:122); E17178 (SEQ ID NO:123); E17177 (SEQ ID NO:124); AF110382 (SEQ ID NO:125); AB021862 (SEQ ID NO:126); U97683 (SEQ ID NO:127); A1326595 (SEQ ID NO:128); U33178 (SEQ ID NO:129); U30179 (SEQ ID NO:130); L34829 (SEQ ID NO:131); L34824 (SEQ ID NO:132); AB012603 (SEQ ID NO:133); AA982887 (SEQ ID NO:134); AF038045 (SEQ ID NO:135); AA710790 (SEQ ID NO:136); AA597171 (SEQ ID NO:137); AA517939 (SEQ ID NO:138); U51986 (SEQ ID NO:139); U51985 (SEQ ID NO:140); AA260731 (SEQ ID NO:141); AA109510 (SEQ ID NO:142); L76979 (SEQ ID NO:143); X70034 (SEQ ID NO:144); X94308 (SEQ ID NO:145); X68651 (SEQ ID NO:146); X94307 (SEQ ID NO:147); A10474 (SEQ ID NO:148); A10471 (SEQ ID NO:149); A10468 (SEQ ID NO:150); A10465 (SEQ ID NO:151); A10462 (SEQ ID NO:152); X55286 (SEQ ID NO:153); J04537 (SEQ ID NO:154); A10473 (SEQ ID NO:155); A10470 (SEQ ID NO:156); A10467 (SEQ ID NO:157); M15959 (SEQ ID NO:158); M62633 (SEQ ID NO:159); M62766 (SEQ ID NO:160); M12705 (SEQ ID NO:161); M22002 (SEQ ID NO:162); L19261 (SEQ ID NO:163); J04200 (SEQ ID NO:164); J03523 (SEQ ID NO:165); M27294 (SEQ ID NO:166); M24015 (SEQ ID NO:167); or a combination thereof.

[0086] Examples of HMG-CoA reductase amino acid sequences that are subsequently altered to achieve solubility of the reductase for the present invention include the following: NP_{—}013636.1 (SEQ ID NO:168); NP_{—}000850.1 (SEQ ID NO:169); CAA25189.1 (SEQ ID NO:170); AAG02454.1 (SEQ ID NO:171); AAG02449.1 (SEQ ID NO:172); AAG02434.1 (SEQ ID NO:173); AAG02429 (SEQ ID NO:174); AAG02423.1 (SEQ ID NO:175); AAD20975.2 (SEQ ID NO:176); BAB07821.1 (SEQ ID NO:177); AAD38406.1 (SEQ ID NO:178); CAA41261.1 (SEQ ID NO:179); AAF80475.1 (SEQ ID NO:180); AAF80374.1 (SEQ ID NO:181); BAA74566.1 (SEQ ID NO:182); BAA74565 (SEQ ID NO:183); AAD47596.1 (SEQ ID NO:184); AAD38873.1 (SEQ ID NO:185); BAA36291.1 (SEQ ID NO:186); AAD09278 (SEQ ID NO:187); AAC46885.1 (SEQ ID NO:188); AAC37437.1 (SEQ ID NO:189); AAC37436.1 (SEQ ID NO:190); AAC37435.1 (SEQ ID NO:191); AAC37434.1 (SEQ ID NO:192); AAC37433.1 (SEQ ID NO:193); AAC37432.1 (SEQ ID NO:194); AAC37431.1 (SEQ ID NO:195); BAA31937.1 (SEQ ID NO:196); AAC05089.1 (SEQ ID NO:197); AAC05088.1 (SEQ ID NO:198); AAB67527.1 (SEQ ID NO:199); BAA06492.1 (SEQ ID NO:200); AAB52552.1 (SEQ ID NO:201); AAB52551.1 (SEQ ID NO:202); AAB39277.1 (SEQ ID NO:203); CAA49628.1 (SEQ ID NO:204); CAA63971.1 (SEQ ID NO:205); CAA48610.1 (SEQ ID NO:206); CAA63970.1 (SEQ ID NO:207); CAA39001.1 (SEQ ID NO:208); AAA76821.1 (SEQ ID NO:209); CAA00908.1 (SEQ ID NO:210); CAA00907.1 (SEQ ID NO:211); CAA00906.1 (SEQ ID NO:212); CAA00905.1 (SEQ ID NO:213); CAA00904.1 (SEQ ID NO:214); AAA67317.1 (SEQ ID NO:215); AAA37819.1 (SEQ ID NO:216); AAA37077.1 (SEQ ID NO:217); AAA34677.1 (SEQ ID NO:218); AAA32814.1 (SEQ ID NO:219); AAA30060.1 (SEQ ID NO:220); AAA29896.1 (SEQ ID NO:221); AAA25894.1 (SEQ ID NO:222); AAA25837.1 (SEQ ID NO:223); P43256 (SEQ ID NO:224); A23586 (SEQ ID NO:225); S12554 (SEQ ID NO:226); S72194 (SEQ ID NO:227); T07112 (SEQ ID NO:228); S56715 (SEQ ID NO:229); S56714 (SEQ ID NO:230); S56712 (SEQ ID NO:231); S56711 (SEQ ID NO:232); S56710 (SEQ ID NO:233); S33175 (SEQ ID NO:234); 028538 (SEQ ID NO:235); AAA25837 (SEQ ID NO:236); O26662 (SEQ ID NO:237); Q58116 (SEQ ID NO:238); Q59468 (SEQ ID NO:239); P54960 (SEQ ID NO:240); P48019 (SEQ ID NO:241); P48020 (SEQ ID NO:242); Q01559 (SEQ ID NO:243); Q03163 (SEQ ID NO:244); Q00583 (SEQ ID NO:245); P13702 (SEQ ID NO:246); P14891 (SEQ ID NO:247); Q9YAS4 (SEQ ID NO:248); Q9Y7D2 (SEQ ID NO:249); Q9XHL5 (SEQ ID NO:250); Q9XEL8 (SEQ ID NO:251); Q9V1R3 (SEQ ID NO:252); Q9V1R3 (SEQ ID NO:253); Q41437 (SEQ ID NO:254); 076819 (SEQ ID NO:255); O74164 (SEQ ID NO:256); O64967 (SEQ ID NO:257); O64966 (SEQ ID NO:258); O59469 (SEQ ID NO:259); O51628 (SEQ ID NO:260); O24594 (SEQ ID NO:261); NP_{—}000850 (SEQ ID NO:262); CAA25189 (SEQ ID NO:263); NP_{—}013555 (SEQ ID NO:264); NP_{—}013308 (SEQ ID NO:265); AAA36989 (SEQ ID NO:266); Q12649 (SEQ ID NO:267); PO₄₀₃₅ (SEQ ID NO:268); AAG21343 (SEQ ID NO:269); AAG02454 (SEQ ID NO:270); AAG02449 (SEQ ID NO:271); AAG02434 (SEQ ID NO:272); AAG02429 (SEQ ID NO:273); AAG02423 (SEQ ID NO:274); AAD20975 (SEQ ID NO:275); BAB07821 (SEQ ID NO:276); AAD38406 (SEQ ID NO:277); AAF80475 (SEQ ID NO:278); AAF80374 (SEQ ID NO:279); AAF80373 (SEQ ID NO:280); Q12577 (SEQ ID NO:281); BAA74566 (SEQ ID NO:282); BAA74565 (SEQ ID NO:283); P54869 (SEQ ID NO:284); O02734 (SEQ ID NO:285); O08424 (SEQ ID NO:286); Q10283 (SEQ ID NO:287); Q29512 (SEQ ID NO:288); P51639 (SEQ ID NO:289); P54839 (SEQ ID NO:290); P54874 (SEQ ID NO:291); Q01581 (SEQ ID NO:292); P54872 (SEQ ID NO:293); P54871 (SEQ ID NO:294); P54873 (SEQ ID NO:295); P54868 (SEQ ID NO:296); P54870 (SEQ ID NO:297); P54961 (SEQ ID NO:298); P48021 (SEQ ID NO:299); P48022 (SEQ ID NO:300); P34136 (SEQ ID NO:301); P34135 (SEQ ID NO:302); Q01237 (SEQ ID NO:303); P20715 (SEQ ID NO:304); P16237 (SEQ ID NO:305); P09610 (SEQ ID NO:306); P14773 (SEQ ID NO:307); P00347 (SEQ ID NO:308); P12684 (SEQ ID NO:309); P29058 (SEQ ID NO:310); P12683 (SEQ ID NO:311); P29057 (SEQ ID NO:312); P17425 (SEQ ID NO:313); P13704 (SEQ ID NO:314); P23228 (SEQ ID NO:315); P22791 (SEQ ID NO:316); AAD47596 (SEQ ID NO.317); 5542336 (SEQ ID NO:318); 5542335 (SEQ ID NO:319); 5542334 (SEQ ID NO:320); 5542333 (SEQ ID NO:321); AAD38873 (SEQ ID NO:322); BAA36291 (SEQ ID NO:323); AAD09278 (SEQ ID NO:324); AAC46885 (SEQ ID NO:325); AAC37437 (SEQ ID NO:326); AAC37435 (SEQ ID NO:327); AAC37434 (SEQ ID NO:328); AAC37433 (SEQ ID NO:329); AAC37432 (SEQ ID NO:330); AAC37431 (SEQ ID NO:331); AAC37436 (SEQ ID NO:332); BAA31937 (SEQ ID NO:333); AAC05089 (SEQ ID NO:334); AAC05088 (SEQ ID NO:335); AAB67527 (SEQ ID NO:336); AAB52552 (SEQ ID NO:337); AAB52551 (SEQ ID NO:338); AAB39277 (SEQ ID NO:339); CAA49628 (SEQ ID NO:340); 2116416F (SEQ ID NO:341); 2116416E (SEQ ID NO:342); 2116416D (SEQ ID NO:343); 2116416C (SEQ ID NO:344); 2116416B (SEQ ID NO:345); 2116416A (SEQ ID NO:346); CAA63971 (SEQ ID NO:347); CAA63970 (SEQ ID NO:348); CAA39001 (SEQ ID NO:349); CAA00906 (SEQ ID NO:350); CAA00907 (SEQ ID NO:351); CAA00908 (SEQ ID NO:352); CAA00904 (SEQ ID NO:353); AAA67317 (SEQ ID NO:354); AAA37819 (SEQ ID NO:355); AAA37077 (SEQ ID NO:356); AAA32814 (SEQ ID NO:357); AAA29896 (SEQ ID NO:358); RDHYE (SEQ ID NO.359); and AAA25894 (SEQ ID NO:360).

[0087] Diterpene synthase nucleic acid sequences that are useful in the present invention include Stevia rebaudiana kaurene synthase (KS22-1) (GenBank Accession number AF097311; SEQ ID NO:361); Stevia rebaudiana kaurene synthase (KS1-1) (GenBank Accession number AF097310; SEQ ID NO:362); Stevia rebaudiana copalyl pyrophosphate synthase (Cpps1) (GenBank Accession No. AF034545; SEQ ID NO:412); Taxus brevifolia taxadiene synthase (TDC1) (GenBank Accession No. U48796; SEQ ID NO:363); Phaeosphaeria sp. L487 mRNA for ent-kaurene synthase (GenBank Accession No. AB003395; SEQ ID NO:364); Abies grandis abietadiene synthase (ac22) (GenBank Accession No. U50768; SEQ ID NO:365) (Stoffer-Vogel et al., 1996); Ricinus communis casbene synthase (GenBank Accession No. L32134; SEQ ID NO:366) (Hill et al., 1996); Cucumis sativus KS mRNA for ent-kaurene synthase (GenBank Accession No. AB045310; SEQ ID NO:367); Lactuca sativa LsKS1 mRNA for ent-kaurene synthase No1 (GenBank Accession No. AB031205; SEQ ID NO:368); Glycine max sequence GenBank Accession No. BE473763 (SEQ ID NO:369); Glycine max sequence GenBank Accession No. AW759166 (SEQ ID NO:370); Gibberella fujikuroi mRNA for GfCPS/KS (GenBank Accession No. AB013295; SEQ ID NO:371); Lotus japonicus cDNA (GenBank Accession No. A1967851; SEQ ID NO:372); Glycine max sequence (GenBank Accession No. AI940878; SEQ ID NO:373); Homo sapiens sequence (GenBank Accession No. A1809939; SEQ ID NO:374); Zea mays kaurene synthase (KS) mRNA (GenBank Accession No. AF105149; SEQ ID NO:375); Arabidopsis thaliana chromosome 1 BAC T8K14 sequence (GenBank Accession No. AC007202; SEQ ID NO:376); Arabidopsis thaliana ent-kaurene synthase (GA2) mRNA (GenBank Accession No. AF034774; SEQ ID NO:377) (Sun and Kamiya, 1994); unknown source cDNA encoding ent-kaurene synthase A (GenBank Accession No. E12936; SEQ ID NO:378); Mycobacterium tuberculosis sequence (GenBank Accession No. AL009198; SEQ ID NO:379); Pisum sativum ent-kaurene synthase A (LS) mRNA (GenBank Accession No. U63652; SEQ ID NO:380); Cucurbita maxima ent-kaurene synthase B mRNA (GenBank Accession No. U43904; SEQ ID NO:381) (Yamaguchi et al., 1996); and Zea mays kaurene synthase A (An1) mRNA (GenBank Accession No. L37750; SEQ ID NO:382) (Bensen et al., 1995).

[0088] Corresponding diterpene synthase amino acid sequences include Stevia rebaudiana kaurene synthase (KS22-1) (GenBank Accession number AAD34295.1 (SEQ ID NO:383); Stevia rebaudiana kaurene synthase (KS1-1) (GenBank Accession number AAD34294.1; SEQ ID NO:384); Stevia rebaudiana copalyl pyrophosphate synthase (Cpps1) (GenBank Accession No. AAB87091.1; SEQ ID NO:385); Taxus brevifolia taxadiene synthase (TDC1) (GenBank Accession No. AAC49310.1; SEQ ID NO:386); Phaeosphaeria sp. L487 mRNA for ent-kaurene synthase (GenBank Accession No. BAA22426.1; SEQ ID NO:387); Abies grandis abietadiene synthase (ac22) (GenBank Accession No. AAB05407.1; SEQ ID NO:388); Cucumis sativus KS mRNA for ent-kaurene synthase (GenBank Accession No. BAB19275.1; SEQ ID NO:389); Lactuca sativa LsKS1 mRNA for ent-kaurene synthase No1 (GenBank Accession No. BAB12441.1; SEQ ID NO:390); Gibberella fujikuroi mRNA for GfCPS/KS (GenBank Accession No. BAA84917.1; SEQ ID NO:391); Zea mays kaurene synthase (KS) mRNA (GenBank Accession No. AAD34319.1; SEQ ID NO:392); Mycobacterium tuberculosis sequence (GenBank Accession No. CAA15731.1; SEQ ID NO:393); Pisum sativum ent-kaurene synthase A (LS) mRNA (GenBank Accession No. AAB58822.1; SEQ ID NO:394); Cucurbita maxima ent-kaurene synthase B mRNA (GenBank Accession No. AAB39482.1; SEQ ID NO:395); Zea mays kaurene synthase A (An1) mRNA (GenBank Accession No. AAA73960.1; SEQ ID NO:396).

[0089] In a specific embodiment, a Ginkgo biloba levopimaradiene synthase nucleic acid sequence (SEQ ID NO:397), which encodes the amino acid sequence of SEQ ID NO:398, is utilized for a diterpene synthase in the present invention, wherein the sequences are the subject of a U.S. patent application filed on the same day as this present application and is entitled, “Ginkgo biloba Levopimaradiene Synthase,” incorporated by reference herein.

[0090] III. Terpenes

[0091] Terpenes are well known in the art, including geraniol or limonene (monoterpenes), farnesol or γ-bisabolene (sesquiterpenes), and squalene or β-amyrin (a triterpene). They are naturally-occurring compounds and are the most abundant components of essential oils of many plants and flowers. Terpenes are extracted from plants and flowers for a variety of purposes by distilling the plants with water. In a specific embodiment, terpenes are biosynthesized from acetyl-CoA (e.g., a derivitized acetate) and isopentenyl pyrophosphate. In one specific embodiment, terpenes are open chain systems or acyclic, such as geraniol, farnesol, geranylgeraniol and citronellal. Other terpenes are monocyclic, such as menthol and zingiberene, although the majority of terpenes are cyclic, such as β-santalol, β-cadinene, matricarin, and copaene. Carotenoids such as β-carotene, a precursor for vitamin A, and lycopene are also terpenes.

[0092] A major class of terpenes includes the sterols. A skilled artisan is aware of many reviews in the field of yeast sterol biosynthesis, such as Parks et al. (1995), Parks and Casey (1995), Paultauf and Kohlwein (1992), and Goldstein and Brown (1990), all of which are incorporated by reference herein in their entirety. The catalytic processes leading to the formation of FPP are commonly referred to as the isoprenoid pathway. The name originates from the isoprene unit (C₅), which subsequent to activation with a pyrophosphate, functions as the building blocks of terpenes. Easily detected by the integral number of C₅ units in their hydrocarbon skeleton, terpenes (i.e., isoprenoids) contribute to critical physiological roles in the cell, including tRNA modification, ubiquinone and dolichol biosynthesis, protein prenylation, and heme A biosynthesis.

[0093] IV. The upc2-1 Allele

[0094] In one aspect of the present invention, a mechanism that effects sterol metabolic flux is controlled. A nucleic acid sequence that encodes a gene that confers an increase on sterol metabolic flux was provided to a cell of a unicellular organism, and the amount of diterpene and diterpene alcohol was measured to determine the increase in sterol metabolic flux as compared to native sterol metabolic flux levels. The increase observed demonstrated that incorporating such nucleic acid sequences for expression in a resulting recombinant cell improves and enhances diterpene levels produced in vivo.

[0095] The representative example employed herein was a sterol uptake control mutant (upc⁻) that was isolated via ethylmethanesulfonate mutagenesis from wild-type Saccharomyces cerevisiae (Lewis et al., 1998). The sterol uptake control UPC2 allele upc2-1 (SEQ ID NO:399) increases the metabolic flux of sterol biosynthesis. It was originally cloned by calcium sensitivity, and the protein contains a DNA binding motif. The upc2-1 allele confers Erg⁻ Hem⁺ prototrophy and is a semi-dominant mutation. The mutation is a point mutation that results in an Asp residue instead of a Gly residue at amino acid 888. The upc2-1 allele (Crowley et al., 1998; Leak et al., 1999; both incorporated by reference in their entirety herein) is utilized in the compositions and methods of the present invention for both overcoming control of sterol importation uptake and increasing sterol biosynthesis (increasing metabolic flux). Another example of a gene that confers such activity is SUT 1 (SEQ ID NO:414; Karst et al., 2001). In another specific embodiment, two separate alleles which confer both phenotypes, or a different single allele which confers both phenotypes, are utilized in lieu of the upc2-1 allele.

[0096] V. HMG-CoA Reductase

[0097] Yeast have two isozymes of HMG-CoA reductase, Hmg1p and Hmg2p, produced from genes on separate chromosomes (Basson et al., 1986), although the vast majority of reductase activity under normal conditions is the result of Hmg1p activity. Null mutations in both genes cause lethality, yet null mutations in either gene alone are viable although survival is reduced (Basson et al., 1987). In a specific embodiment of the present invention, endogenous copies of both HMG1 and HMG2 remain intact in the cell which harbors the recombinant nucleic acid sequence encoding the soluble form of HMG-CoA reductase.

[0098] The cells of the present invention preferably comprise HMG-CoA reductase to improve production of diterpenes and diterpene precursors. HMG-CoA reductase is a rate-limiting enzyme in early sterol biosynthesis in eukaryotic cells. A skilled artisan is aware that increasing significant levels of HMG-CoA reductase in a yeast cell, which is membrane-bound in most organisms, results in generation of extensive membrane structures (Profant et al., 1999) that is detrimental to diterpene and diterpene precursor biosyntheses. Therefore, it is preferred that the form of HMG-CoA reductase utilized in the compositions of the present invention lack sequences responsible or associated with transmembrane domains. These structures are easily identified by standard means in the art, such as commercially available computer programs including Genetics Computer Group® (Madison, Wis.). To eliminate the rate limitation associated with this enzyme in the yeast Saccharomyces cerevisiae, a truncated HMG1 gene producing a form of the enzyme that lacks the membrane-binding region (i.e. amino acids 1-552; SEQ ID NO:400) (Polakowski et al., 1998) was utilized in the preferred embodiments.

[0099] A skilled artisan is aware that there are structurally distinct HMG-CoA reductases depending on the organism. For example, Arabidopsis HMG-CoA reductase lacks the membrane-spanning architecture present in other organisms, yet overexpression of the Arabidopsis nucleic acid sequence encoding HMG-CoA reductase in a yeast mutant suppresses its growth defect, suggesting the sequence is functionally interchangeable between the two organisms (Learned and Fink, 1989; incorporated by reference herein in its entirety). A similar experiment demonstrated restoration of normal growth to a CHO cell line which was HMG-CoA reductase-deficient (Goldstein and Brown, 1990). Thus, a skilled artisan is aware by the methods and design of Learned and Fink (1989) and by methods well known in the art how to test other HMG-CoA reductase sequences for functional complementation of a yeast HMG-CoA reductase defect. A skilled artisan is also aware that although structural differences exist between different organisms, the preferred aspects of the sequence are intracellular solubility and reductase activity. Therefore, in specific embodiments of the present invention, the nucleic acid sequence encoding a HMG-CoA reductase contains a deletion corresponding to an N-terminal sequence.

[0100] It is well known that there are two native S. cerevisiae HMG-CoA reductases, both of which have a N-terminus transmembrane spanning domain (1.6 kb). Thus, in a preferred embodiment, a yeast HMG-CoA reductase lacking at least part of this domain is utilized in the compositions and methods of the present invention.

[0101] VI. Geranylgeranyl Pyrophosphate

[0102] The BTS1 gene in Saccharomyces cerevisiae was cloned as a suppressor of a bet2-1 mutant, which is defective for the β-subunit of the type II geranylgeranyltransferase (Jiang et al., 1990). BTS1 suppresses a growth defect of bet2-1 whether expressed on a low (CEN) or multiple (2 um) copy vector. Furthermore, the BTS1 gene product demonstrates functional activity of a geranylgeranyl pyrophosphate (GGPP) synthase, such as functionally substituting for a bacterial GGPP synthase. The BET2 gene product is important for geranylgeranylation of a multitude of proteins in a variety of cellular processes, such as small GTP-binding proteins of the Ras superfamily and nuclear lamins. Up to 0.5% of cellular proteins are estimated to be prenylated which increases hydrophobicity and permits protein association with cellular membranes. Geranylgeranylation occurs from covalent attachment of all-trans geranylgeranyl diphosphate to proteins comprising terminal cysteines within CAAL, CC, or CXC sequence motifs. GGPP biosynthesis is critical for cell viability, and modifications in the prenylation pathway are contemplated to preferably include a reduced rate of GGPP consumption wherein the reduced rate is sufficient to maintain integrity of cellular homeostasis.

[0103] VII. Nucleic Acid-Based Expression Systems

[0104] A. Vectors

[0105] The term “vector” is used to refer to a carrier nucleic acid molecule into which a nucleic acid sequence can be inserted for introduction into a cell where it can be replicated. A nucleic acid sequence can be “exogenous,” which means that it is foreign to the cell into which the vector is being introduced or that the sequence is homologous to a sequence in the cell but in a position within the host cell nucleic acid in which the sequence is ordinarily not found. Vectors include plasmids, cosmids, viruses (bacteriophage, animal viruses, and plant viruses), and artificial chromosomes (e.g., YACs). One of skill in the art would be well equipped to construct a vector through standard recombinant techniques, which are described in Maniatis et al., 1988 and Ausubel et al., 1994, both incorporated herein by reference.

[0106] The term “expression vector” refers to a vector containing a nucleic acid sequence coding for at least part of a gene product capable of being transcribed. In some cases, RNA molecules are then translated into a protein, polypeptide, or peptide. In other cases, these sequences are not translated, for example, in the production of antisense molecules or ribozymes. Expression vectors can contain a variety of “control sequences,” which refer to nucleic acid sequences necessary for the transcription and possibly translation of an operably linked coding sequence in a particular host organism. In addition to control sequences that govern transcription and translation, vectors and expression vectors may contain nucleic acid sequences that serve other functions as well and are described infra.

[0107] 1. Promoters and Enhancers

[0108] A “promoter” is a control sequence that is a region of a nucleic acid sequence at which initiation and rate of transcription are controlled. It may contain genetic elements at which regulatory proteins and molecules may bind such as RNA polymerase and other transcription factors. The phrases “operatively positioned,” “operatively linked,” “under control,” and “under transcriptional control” mean that a promoter is in a correct functional location and/or orientation in relation to a nucleic acid sequence to control transcriptional initiation and/or expression of that sequence. A promoter may or may not be used in conjunction with an “enhancer,” which refers to a cis-acting regulatory sequence involved in the transcriptional activation of a nucleic acid sequence.

[0109] A promoter may be one naturally associated with a gene or sequence, as may be obtained by isolating the 5′ non-coding sequences located upstream of the coding segment and/or exon. Such a promoter can be referred to as “endogenous.” Similarly, an enhancer may be one naturally associated with a nucleic acid sequence, located either downstream or upstream of that sequence. Alternatively, certain advantages will be gained by positioning the coding nucleic acid segment under the control of a recombinant or heterologous promoter, which refers to a promoter that is not normally associated with a nucleic acid sequence in its natural environment. A recombinant or heterologous enhancer refers also to an enhancer not normally associated with a nucleic acid sequence in its natural environment. Such promoters or enhancers may include promoters or enhancers of other genes, and promoters or enhancers isolated from any other prokaryotic, viral, or eukaryotic cell, and promoters or enhancers not “naturally occurring,” i.e., containing different elements of different transcriptional regulatory regions, and/or mutations that alter expression. In addition to producing nucleic acid sequences of promoters and enhancers synthetically, sequences may be produced using recombinant cloning and/or nucleic acid amplification technology, including PCR™, in connection with the compositions disclosed herein (see U.S. Pat. No. 4,683,202, U.S. Pat. No. 5,928,906, each incorporated herein by reference). Furthermore, it is contemplated the control sequences that direct transcription and/or expression of sequences within non-nuclear organelles such as mitochondria, chloroplasts, and the like, can be employed as well.

[0110] Naturally, it will be important to employ a promoter and/or enhancer that effectively directs the expression of the DNA segment in the cell type, organelle, and organism chosen for expression. Those of skill in the art of molecular biology generally know the use of promoters, enhancers, and cell type combinations for protein expression, for example, see Sambrook et al. (1989), incorporated herein by reference. The promoters employed may be constitutive, tissue-specific, inducible, and/or useful under the appropriate conditions to direct high level expression of the introduced DNA segment, such as is advantageous in the large-scale production of recombinant proteins and/or peptides. The promoter may be heterologous or endogenous.

[0111] Table 1 lists several elements/promoters that may be employed, in the context of the present invention, to regulate the expression of a gene. This list is not intended to be exhaustive of all the possible elements involved in the promotion of expression but, merely, to be exemplary thereof. Table 2 provides examples of inducible elements, which are regions of a nucleic acid sequence that can be activated in response to a specific stimulus.

TABLE 1
Promoter and/or Enhancer

| Promoter/Enhancer | References |
|---|---|
| Immunoglobulin Heavy Chain | Banerji et al., 1983; Gilles et al., 1983; |
| | Grosschedl et al., 1985; Atchinson et al., |
| | 1986, 1987; Imler et al., 1987; Weinberger |
| | et al., 1984; Kiledjian et al., 1988; Porton |
| | et al.; 1990 |
| Immunoglobulin Light Chain | Queen et al., 1983; Picard et al., 1984 |
| T-Cell Receptor | Luria et al., 1987; Winoto et al., 1989; |
| | Redondo et al.; 1990 |
| HLA DQ a and/or DQ β | Sullivan et al., 1987 |
| β-Interferon | Goodbourn et al., 1986; Fujita et al., 1987; |
| | Goodbourn et al., 1988 |
| Interleukin-2 | Greene et al., 1989 |
| Interleukin-2 Receptor | Greene et al., 1989; Lin et al., 1990 |
| MHC Class II 5 | Koch et al., 1989 |
| MHC Class II HLA-DRa | Sherman et al., 1989 |
| β-Actin | Kawamoto et al., 1988; Ng et al.; 1989 |
| Muscle Creatine Kinase | Jaynes et al., 1988; Horlick et al., |
| (MCK) | 1989; Johnson et al., 1989 |
| Prealbumin (Transthyretin) | Costa et al., 1988 |
| Elastase I | Omitz et al., 1987 |
| Metallothionein (MTII) | Karin et al., 1987; Culotta et al., 1989 |
| Collagenase | Pinkert et al., 1987; Angel et al., 1987 |
| Albumin | Pinkert et al., 1987; Tronche et al., |
| | 1989, 1990 |
| α-Fetoprotein | Godbout et al., 1988; Campere et al., 1989 |
| t-Globin | Bodine et al., 1987; Perez-Stable et al., |
| | 1990 |
| β-Globin | Trudel et al., 1987 |
| c-fos | Cohen et al., 1987 |
| c-HA-ras | Triesman, 1986; Deschamps et al., 1985 |
| Insulin | Edlund et al., 1985 |
| Neural Cell Adhesion | Hirsh et al., 1990 |
| Molecule (NCAM) | |
| α₁-Antitrypain | Latimer et al., 1990 |
| H2B (TH2B) Histone | Hwang et al., 1990 |
| Mouse and/or Type I Collagen | Ripe et al., 1989 |
| Glucose-Regulated Proteins | Chang et al., 1989 |
| (GRP94 and GRP78) | |
| Rat Growth Hormone | Larsen et al., 1986 |
| Human Serum Amyloid A | Edbrooke et al., 1989 |
| (SAA) | |
| Troponin I (TN I) | Yutzey et al., 1989 |
| Platelet-Derived Growth | Pech et al., 1989 |
| Factor (PDGF) | |
| Duchenne Muscular | Kiamut et al., 1990 |
| Dystrophy | |
| SV40 | Banerji et al., 1981; Moreau et al., 1981; |
| | Sleigh et al., 1985; Firak et al., 1986; |
| | Herr et al., 1986; Imbra et al., 1986; |
| | Kadesch et al., 1986; Wang et al., 1986; |
| | Ondek et al., 1987; Kuhl et al., 1987; |
| | Schaffner et al., 1988 |
| Polyoma | Swartzendruber et al., 1975; Vasseur |
| | et al., 1980; Katinka et al., 1980, 1981; |
| | Tyndell et al., 1981; Dandolo et al., 1983; |
| | de Villiers et al., 1984; Hen et al., 1986; |
| | Satake et al., 1988; Campbell and/or |
| | Villarreal, 1988 |
| Retroviruses | Kriegler et al., 1982, 1983; Levinson et |
| | al., 1982; Kriegler et al., 1983, 1984a, b, |
| | 1988; Bosze et al., 1986; Miksicek et al., |
| | 1986; Celander et al., 1987; Thiesen et al., |
| | 1988; Celander et al., 1988; Chol et al., |
| | 1988; Reisman et al., 1989 |
| Papilloma Virus | Campo et al., 1983; Lusky et al., 1983; |
| | Spandidos and/or Wilkie, 1983; Spalholz |
| | et al., 1985; Lusky et al., 1986; Cripe |
| | et al., 1987; Gloss et al., 1987; Hirochika |
| | et al., 1987; Stephens et al., 1987; Glue |
| | et al., 1988 |
| Hepatitis B Virus | Bulla et al., 1986; Jameel et al., 1986; |
| | Shaul et al., 1987; Spandau et al., 1988; |
| | Vannice et al., 1988 |
| Human Immunodeficiency | Muesing et al., 1987; Hauber et al., 1988; |
| Virus | Jakobovits et al., 1988; Feng et al., 1988; |
| | Takebe et al., 1988; Rosen et al., 1988; |
| | Berkhout et al., 1989; Laspia et al., 1989; |
| | Sharp et al., 1989; Braddock et al., 1989 |
| Cytomegalovirus (CMV) | Weber et al., 1984; Boshart et al., 1985; |
| | Foecking et al., 1986 |
| Gibbon Ape Leukemia Virus | Holbrook et al., 1987; Quinn et al., 1989 |

[0112] TABLE 2
Inducible Elements

| Element | Inducer | References |
|---|---|---|
| MT II | Phorbol Ester | Palmiter et al., 1982; Haslinger |
| | (TFA) | et al., 1985; Searle et al., 1985; |
| | Heavy metals | Stuart et al., 1985; Imagawa |
| | | et al., 1987, Karin et al., 1987; |
| | | Angel et al., 1987b; McNeall |
| | | et al., 1989 |
| MMTV | Glucocorticoids | Huang et al., 1981; Lee et al., |
| (mouse mammary | | 1981; Majors et al., 1983; |
| tumor virus) | | Chandler et al., 1983; Lee et al., |
| | | 1984; Ponta et al., 1985; Sakai |
| | | et al., 1988 |
| β-Interferon | poly(rI)x | Tavernier et al., 1983 |
| | poly(rc) | |
| Adenovirus 5 E2 | E1A | Imperiale et al., 1984 |
| Collagenase | Phorbol Ester | Angel et al., 1987a |
| | (TPA) | |
| Stromelysin | Phorbol Ester | Angel et al., 1987b |
| | (TPA) | |
| SV40 | Phorbol Ester | Angel et al., 1987b |
| | (TPA) | |
| Murine MX Gene | Interferon, | Hug et al., 1988 |
| | Newcastle | |
| | Disease Virus | |
| GRP78 Gene | A23187 | Resendez et al., 1988 |
| α-2-Macroglobulin | IL-6 | Kunz et al., 1989 |
| Vimentin | Serum | Rittling et al., 1989 |
| MHC Class I Gene | Interferon | Blanar et al., 1989 |
| H-2κb | | |
| HSP70 | E1A, SV40 | Taylor et al., 1989, 1990a, 1990b |
| | Large T | |
| | Antigen | |
| Proliferin | Phorbol | Mordacq et al., 1989 |
| | Ester-TPA | |
| Tumor Necrosis | PMA | Hensel et al., 1989 |
| Factor | | |
| Thyroid Stimulating | Thyroid | Chatterjee et al., 1989 |
| Hormone α Gene | Hormone | |

[0113] The identity of tissue-specific promoters or elements, as well as assays to characterize their activity, is well known to those of skill in the art. Examples of such regions include the human LIMK2 gene (Nomoto et al. 1999), the somatostatin receptor 2 gene (Kraus et al., 1998), murine epididymal retinoic acid-binding gene (Lareyre et al., 1999), human CD4 (Zhao-Emonet et al., 1998), mouse alpha2 (XI) collagen (Tsumaki, et al., 1998), D1A dopamine receptor gene (Lee, et al., 1997), insulin-like growth factor II (Wu et al., 1997), human platelet endothelial cell adhesion molecule-1 (Almendro et al., 1996).

[0114] In a preferred embodiment of the present invention, an inducible promoter is employed. In a preferred embodiment of the present invention, a GAL1 inducible promoter is employed. In other embodiments, a CUP1 or MET3 promoter is utilized. In S. cerevisiae, the copper metallothionein proteins encoded by CUP1 and CRS5 exhibit negative regulation by oxygen (Rae et al., 1999). Heterologous expression of genes under control of the CUP1 promoter yielded competitive transcriptional levels relative to the strong, constitutive GAPDH promoter and allowed successful characterization of a mammalian reductase (Hottiger et al., 1994; Poletti et al., 1996). MET3 promoters are also known in the art (Cherest et al., 1985; Mountain et al., 1991; Hampton et al., 1999).

[0115] In a specific embodiment, a constitutive promoter is utilized to regulate expression of a nucleic acid sequence of the present invention. Non-limiting examples of constitutive promoters include PGK and ADH, both of which are easily obtained using standard methods in the art such as PCR of genomic yeast DNA.

[0116] 2. Initiation Signals and Internal Ribosome Binding Sites

[0117] A specific initiation signal also may be required for efficient translation of coding sequences. These signals include the ATG initiation codon or adjacent sequences. Exogenous translational control signals, including the ATG initiation codon, may need to be provided. One of ordinary skill in the art would readily be capable of determining this and providing the necessary signals. It is well known that the initiation codon must be “in-frame” with the reading frame of the desired coding sequence to ensure translation of the entire insert. The exogenous translational control signals and initiation codons can be either natural or synthetic. The efficiency of expression may be enhanced by the inclusion of appropriate transcription enhancer elements.

[0118] In certain embodiments of the invention, the use of internal ribosome entry sites (IRES) elements are used to create multigene, or polycistronic, messages. IRES elements are able to bypass the ribosome scanning model of 5′ methylated Cap dependent translation and begin translation at internal sites (Pelletier and Sonenberg, 1988). IRES elements from two members of the picornavirus family (polio and encephalomyocarditis) have been described (Pelletier and Sonenberg, 1988), as well an IRES from a mammalian message (Macejak and Sarnow, 1991). IRES elements can be linked to heterologous open reading frames. Multiple open reading frames can be transcribed together, each separated by an IRES, creating polycistronic messages. By virtue of the IRES element, each open reading frame is accessible to ribosomes for efficient translation. Multiple genes can be efficiently expressed using a single promoter/enhancer to transcribe a single message (see U.S. Pat. Nos. 5,925,565 and 5,935,819, herein incorporated by reference).

[0119] 3. Multiple Cloning Sites

[0120] Vectors include a multiple cloning site (MCS), which is a nucleic acid region that contains multiple restriction enzyme sites, any of which can be used in conjunction with standard recombinant technology to digest the vector. (See Carbonelli et al., 1999, Levenson et al., 1998, and Cocea, 1997, incorporated herein by reference.) “Restriction enzyme digestion” refers to catalytic cleavage of a nucleic acid molecule with an enzyme that functions only at specific locations in a nucleic acid molecule. Many of these restriction enzymes are commercially available. Use of such enzymes is widely understood by those of skill in the art. Frequently, a vector is linearized or fragmented using a restriction enzyme that cuts within the MCS to enable exogenous sequences to be ligated to the vector. “Ligation” refers to the process of forming phosphodiester bonds between two nucleic acid fragments, which may or may not be contiguous with each other. Techniques involving restriction enzymes and ligation reactions are well known to those of skill in the art of recombinant technology.

[0121] 4. Splicing Sites

[0122] Most transcribed eukaryotic RNA molecules undergo RNA splicing to remove introns from the primary transcripts. Vectors containing genomic eukaryotic sequences require donor and/or acceptor splicing sites to ensure proper processing of the transcript for protein expression. (See Chandler et al., 1997, herein incorporated by reference.)

[0123] 5. Polyadenylation Signals

[0124] In expression, one typically includes a polyadenylation signal to effect proper polyadenylation of the transcript. The nature of the polyadenylation signal is not believed to be crucial to the successful practice of the invention, and/or any such sequence is employed. Preferred embodiments include the SV40 polyadenylation signal and/or the bovine growth hormone polyadenylation signal, convenient and/or known to function well in various target cells. Also contemplated as an element of the expression cassette is a transcriptional termination site. These elements serve to enhance message levels and/or to minimize read through from the cassette into other sequences.

[0125] 6. Origins of Replication

[0126] In order to propagate a vector in a host cell, it contains one or more origins of replication sites (often termed “ori”), which is a specific nucleic acid sequence at which replication is initiated. Alternatively an autonomously replicating sequence (ARS) is employed if the host cell is yeast. Further, yeast expression vectors containing an ARS are known that permit multiple copies of the vector in the same cell and, alternatively, there are yeast expression vectors that permit a single copy of the vector to reside in the cell (known as “single-copy”).

[0127] 7. Selectable and Screenable Markers

[0128] In certain embodiments of the invention, the cells contain nucleic acid construct of the present invention, a cell is identified in vitro or in vivo by including a marker in the expression vector. Such markers confer an identifiable change to the cell permitting easy identification of cells containing the expression vector. Generally, a selectable marker is one that confers a property that allows for selection. A positive selectable marker is one in which the presence of the marker allows for its selection, and a negative selectable marker is one in which its presence prevents its selection. An example of a positive selectable marker is a drug resistance marker.

[0129] Usually the inclusion of a drug selection marker aids in the cloning and identification of transformants, for example, genes that confer resistance to neomycin, puromycin, hygromycin, DHFR, GPT, zeocin and histidinol are useful selectable markers. In addition to markers conferring a phenotype that allows for the discrimination of transformants based on the implementation of conditions, other types of markers including screenable markers such as GFP, whose basis is calorimetric analysis, are also contemplated. Alternatively, screenable enzymes such as herpes simplex virus thymidine kinase (tk) or chloramphenicol acetyltransferase (CAT) may be utilized. One of skill in the art would also know how to employ immunologic markers, possibly in conjunction with FACS analysis. The marker used is not believed to be important, so long as it is capable of being expressed simultaneously with the nucleic acid encoding a gene product. Further examples of selectable and screenable markers are well known to one of skill in the art.

[0130] B. Host Cells

[0131] As used herein, the terms “cell,” “cell line,” and “cell culture” may be used interchangeably. All of these terms also include their progeny, which is any and all subsequent generations. It is understood that all progeny are not necessarily identical due to deliberate or inadvertent mutations. In the context of expressing a heterologous nucleic acid sequence, “host cell” preferably refers to a eukaryotic yeast cell, and it includes a transformable organism that is capable of replicating a vector and/or expressing a heterologous gene encoded by a vector. A host cell is, and has been, used as a recipient for vectors. A host cell is “transfected” or “transformed,” which refers to a process by which exogenous nucleic acid is transferred or introduced into the host cell. A transformed cell includes the primary subject cell and its progeny.

[0132] An appropriate host is employed by one of skill in the art based on the vector backbone and the desired result. A plasmid or cosmid, for example, is introduced into a yeast cell for replication of many vectors. Alternatively, a vector is introduced into a yeast cell for integration into the chromosome of the yeast cell.

[0133] Some vectors may employ control sequences that allow it to be replicated and/or expressed in both prokaryotic and eukaryotic cells. One of skill in the art would further understand the conditions under which to incubate all of the above described host cells to maintain them and to permit replication of a vector. Also understood and known are techniques and conditions that would allow large-scale production of vectors, as well as production of the nucleic acids encoded by vectors and their cognate polypeptides, proteins, or peptides.

[0134] C. Expression Systems

[0135] In a specific embodiment of the present invention, a vector is constructed and/or replicated in a bacterial host cell. Examples of eukaryotic host cells for replication and/or expression of a vector include HeLa, NIH3T3, Jurkat, 293, Cos, CHO, Saos, and PC12. Many host cells from various cell types and organisms are available and would be known to one of skill in the art. Similarly, a viral vector may be used in conjunction with either a eukaryotic or prokaryotic host cell, particularly one that is permissive for replication or expression of the vector.

[0136] Numerous expression systems exist that comprise at least a part or all of the compositions discussed above. Prokaryote- and/or eukaryote-based systems can be employed for use with the present invention to produce nucleic acid sequences, or their cognate polypeptides, proteins and peptides. Many such systems are commercially and widely available.

[0137] The insect cell/baculovirus system can produce a high level of protein expression of a heterologous nucleic acid segment, such as described in U.S. Pat. Nos. 5,871,986, 4,879,236, both herein incorporated by reference, and which can be bought, for example, under the name MAXBAC® 2.0 from INVITROGEN® (Carlsbad, Calif.) and BACPACK™ BACULOVIRUS EXPRESSION SYSTEM FROM CLONTECH® (Palo Alto, Calif.).

[0138] Other examples of expression systems include STRATAGENE®'s (La Jolla, Calif.) COMPLETE CONTROL™ Inducible Mammalian Expression System, which involves a synthetic ecdysone-inducible receptor, or its pET Expression System, an E. coli expression system. Another example of an inducible expression system is available from INVITROGEN®, which carries the T-REX™ (tetracycline-regulated expression) System, an inducible mammalian expression system that uses the full-length CMV promoter. INVITROGEN® also provides yeast expression systems called the Pichia methanolica Expression System and the Pichia pastoris Expression System, both of which are designed for high-level production of recombinant proteins in the methylotrophic yeast Pichia methanolica and Pichia pastoris, respectively. One of skill in the art would know how to express a vector, such as an expression construct, to produce a nucleic acid sequence or its cognate polypeptide, protein, or peptide.

### EXAMPLES

[0139] The following examples are included to demonstrate preferred embodiments of the invention. It should be appreciated by those skilled in the art that the techniques disclosed in the examples which follow represent techniques discovered by the inventor to function well in the practice of the invention, and thus is considered to constitute preferred modes for its practice. However, those of skill in the art should, in light of the present disclosure, appreciate that many changes made in the specific embodiments which are disclosed and maintain a like or similar result without departing from the concept, spirit and scope of the invention. More specifically, it is apparent that certain agents that are both chemically and physiologically related may be substituted for the agents described herein while the same or similar results would be achieved. All such similar substitutes and modifications apparent to those skilled in the art are deemed to be within the spirit, scope and concept of the invention as defined by the appended claims.

### Example 1

### Methods and Materials

[0140] Restriction enzymes, DNA polymerase I large (Klenow) fragment, T4 DNA polymerase, calf intestinal alkaline phosphatase, single-stranded binding protein, and M13K07 helper phage were purchased from New England BioLabs. Ligation reactions utilized Fast-Link DNA ligation kit purchased from Epicentre Technologies. Expand high fidelity polymerase kit used for PCR was purchased from Boehringer-Mannheim. Pfu polymerase and pGEM-T vector kit were purchased from Promega. pT7Blue T-vector was purchased from Novagen. Ex-Taq was purchased from Panvera. Zymolyase 100T was purchased from Seikagaku Corporation. Media ingredients were purchased from Fisher Biotech. Reagent chemicals were purchased from Sigma Chemical Company. Organic solvents were purchased from EM Science.

[0141] All E. coli cultures were cultivated in sterile Luria broth, LB. E. coli selective plates, LB-amp, were impregnated with ampicillin (250× stock: 25 mg/mL, filter sterilized) to a final concentration of 0.1 mg/mL. Blue-white recombinant E. coli selection required, in addition to ampicillin, 5-bromo-4-chloro-3-indoyl-β-D-galactoside (X-gal) added to the solid media to a final concentration of 20 μg/mL (200× stock: 200 mg X-Gal dissolved in 50 mL DMF).

[0142] The amino acid dropout mixes used were deficient in leucine, uracil, histidine, or tryptophan; the plasmid marker determined which amino acid mix was used in the preparation of the 2×Sc. The carbon sources were sugar solutions of dextrose (2×D: 20 g dextrose dissolved in 500 mL deionized water, then autoclaved 40 ml), or galactose (2×G: 20 g galactose dissolved in 500 mL deionized water, then autoclaved 40 min). The latter, galactose, was used to induce heterologous expression of recombinant genes and is, therefore, referred to as inducing media. Liquid media contained equal volumes of a nitrogen source and a carbon source. For solid yeast media, 7.5 g agar/500 mL was added to the carbon sources prior to sterilization. Plates for yeast cultivation contained a nitrogen source, a carbon source containing agar, and appropriate nutritional supplements, if needed. Supplements used were ergosterol (100×erg: 20 mg ergosterol dissolved in 5 mL ethanol and 5 mL Tween 80), hemin (100×hem: 13 mg hemin dissolved in 50% ethanol, 5 mM NaOH), cupric sulfate (0.1 M CuSO₄ stock: 638 mg cupric sulfate dissolved in 40 mL deionized water, filter sterilized), cholesterol (100×chol: 40 mg/mL prepared similarly to ergosterol supplement), nystatin (1 mg/mL dissolved in DMF; diluted with sterile deionized water), and 5-fluoroorotic acid (added directly to selective medium to a final concentration of 1 mg/mL).

### Example 2

### Production of GGPP in De Novo Sterol Biosynthesis

[0143] The amount of endogenous GGPP available in yeast having a native sterol biosynthetic pathway was established. FIG. 2 illustrates the main intermediates of de novo sterol biosynthesis in native yeast. FIG. 3 illustrates the terpene sub-classes and the sterol intermediates that serves as their biosynthetic precursors. Diterpenes are synthesized from (e.g., diterpene precursor) the metabolic intermediate geranylgeranyl pyrophosphate (GGPP).

[0144] Wild type yeast JBY575 (Alani et al., 1987) was transformed with a vector comprising a nucleic acid sequence encoding A. grandis abietadiene synthase (Mende et al., 1997). The culture media contained a polyaromatic resin that indiscriminately adsorbed molecules onto its surface. The induced culture was filtered and extracted to remove the diterpene product, and about 0.01 mg/L abietadiene (extrapolated from the internal standard longifolene at known concentrations) was observed by GC and GC/MS analyses. Because abietadiene relocated into the induction media, the elution of the adsorbed abietadiene from the resin or organic extraction of the media afforded the analytical sample. Control analyses included an uninduced culture of JBY575[pEH9.0] and an induced culture of the same strain comprising vector lacking the abietadiene synthase, JBY575[pRS426Gal]; neither control culture yielded detectable biosynthetic diterpene.

### Example 3

### Generation of GGPP-Synthesizing Yeast

[0145] Investigation of increasing GGPP biosynthesis included heterologous expression of the S. cerevisiae geranylgeranyl diphosphate synthase (BTS1) under transcriptional control of the inducible GAL1 promoter (Jiang et al., 1993).

[0146] The BTS1 nucleic acid sequence was isolated from λ phage received from ATCC using standard methods. Phage DNA containing S. cerevisiae BTS1 was digested with Xho1 and Kpn1 to release a 7 kb DNA fragment that subsequent to purification was ligated into pBluescript (II) KS⁺ digested with the same two enzymes. Propagation in DH5α yielded pEH1.0. Excess sequence was removed from the insert of pEH1.0 to yield pEH1.1.

[0147] The native promoter of BTS1 was removed by installing a Sal1 site immediately upstream of the start codon by site-directed mutagenesis employing the oligonucleotide sequence GP5S: 5′-TATCTTGGCCTCCATGTCGAC TCCAGACTCGTAAAC-3′ (SEQ ID NO:408) and standard methodologies known in the art. The resulting plasmid was named pEH1.2 and confirmed by sequencing. The nucleic acid sequence encoding BTS1 was removed by double digestion of pEH1.2 with Sal1 and Not1 and inserted into yeast expression vectors pRS305Gal and pRS426Gal to afford plasmids pEH1.3 and pEH1.4, respectively.

[0148] JBY575 (MATa ura3-52 trp1-Δ63 leu2-3,112 his3-A200 ade2 Gal⁺) was transformed with BstE II digested pEH1.3 and selected on 2% glucose, 1.5% agar, and 2% synthetic complete media lacking leucine by growing at 30° C. until colonies were observed (˜2-3 days). A second round of selection on the same medium yielded EHY1 (MATa pGAL1-BTS1::LEU2 ura3-52 trp1-Δ63 leu2-3,112 his3-Δ200 ade2 Gal⁺), which was transformed with pEH9.0. Induced cultures of EHY1[pEH9.0] afforded approximately 0.05-0.10 mg/L detectable abietadiene. FIG. 4 illustrates the engineered metabolic pathway of EHY1 The uninduced culture of EHY1[pEH9.0] exhibited no biosynthetic abietadiene indicating that the acquired ability to manufacture Bts1p in response to galactose provided in the growth medium led to increased production of diterpene and consequently diterpene precursor.

[0149] The amount of diterpene observed was recognized as an indirect indicator of the increased amount of endogenous GGPP. The indirect measure has the advantage that accumulation of high amounts of GGPP does not effect inherent regulation of sterol biosynthesis. In a specific example, abietadiene was generated by adding a nucleic acid that encodes abietadiene synthase (SEQ ID NO:365; Funk and Croteau, 1994) to the cell. The sequence was plasmid-borne and retained in the cell by selection.

### Example 4

### Altering Metabolic Flux to Produce Diterpenes

[0150] Increasing metabolic flux through the sterol biosynthetic pathway to increase the biosynthetic rate of a diterpene precursor GGPP was demonstrated. The HMG-CoA reductase (HMGR) enzyme effects reduction of HMG-CoA to mevalonic acid and is known to be a rate-limiting transformation in sterol biosynthesis. One mechanism employed to increase metabolic flux involved increasing the reaction rate of a rate-determining reaction.

[0151] The S. cerevisiae HMG1 was obtained by a PCR strategy to include a nucleic acid sequence encoding amino acids 545-1054 and a start codon (ATG) in-frame with the first coding residue. The removal of the transmembrane spanning domains was effected by installing a Sal I site at the desired splice site. The HMG1 was processed using standard methods to produce a soluble form of the HMG-CoA reductase. Yeast shuttle vectors pRS305Ga1 and pRS314Ga1 comprising the nucleic acid sequence encoding the soluble form of HMG1 were named pEH12.1 and pEH12.2, respectively. The plasmids differed by their selectable markers (LEU2 and TRP1, respectively) and their type of expression vector (integrative and single-copy, respectively). Both pEH12.1 and pEH12.2 further comprised the GAL1 inducible promoter by which expression of the soluble form of HMG1 was controlled.

[0152] Recombinant yeast strain EHY1 was cotransformed with pEH12.2 and pEH9.0 and maintained on selective media. The resulting strain, EHY1 [pEH12.2][pEH9.0], produced approximately 1.0 mg/L abietadiene. Unexpectedly, geranylgeraniol (GGOH) was also detected in the induced culture of EHY1[pEH12.2][pEH9.0] and suggested that the diterpene synthase represented a rate-limiting step in the installed diterpene pathway. A skilled artisan recognizes that metabolic pathways are regulated, and the observed alteration in GGPP biosynthesis is vulnerable to inducing such regulation. Thus, alternatively, the observed GGOH suggests that a regulatory event has been initiated to achieve homeostatic levels of GGPP. The excess GGPP was readily hydrolyzed in the cytoplasm to produce intracellular GGOH, a known cytotoxin, which is then excreted from the cell. Previous observations identifying sterol intermediates in the growth media of cultured cells suggested that passive diffusion through the lipid bilayer lay cause for the export out of the cell.

[0153] In another specific embodiment, Arabidopsis thaliana HMG-CoA reductase nucleic acid sequence (such as SEQ ID NO:251, SEQ ID NO:267 or SEQ ID NO:468), which contains only two transmembrane spanning domains rather than seven domains present in the yeast primary sequence, is incorporated into the S. cerevisiae genome under control of a promoter, preferably an inducible promoter.

### Example 5

### Production of Geranylgeraniol

[0154] Geranylgeranyl pyrophosphate is an unstable molecule due to the lability of the pyrophosphate moiety. The instability directly effects the cost of commercially available GGPP. The organism of the present invention provides an alternative to producing GGPP and employing GGPP in the synthesis of diterpenes in vivo. Further, the organism provides GGOH, an important synthetic material that is too costly for large scale commercial use. FIG. 8 illustrates the amount of geranylgeraniol production in a cell of the present invention grown in media comprising 2% galactose. The dotted line is the GGOH production in yeast comprising a chromosomal nucleic acid sequence encoding BTS1 under control of the GAL1 promoter and the plasmid-borne nucleic acid sequence encoding the soluble form of HMG1 under the control of the GAL1 promoter. The broken line is the same strain further comprising abietadiene synthase under control of the GAL1 promoter (EHY1[pEH12.2][pEH9.0]).

[0155] Peak areas were obtained by GC analyses and are reported in picoamps (pA), which indicates the abundance of analyte as measured electronically by the flame-ionization detector. The Day 2 induced culture of EHY1[pEH12.2][pEH9.0] produced undetectable levels of GGOH. However, GGOH production increased between Days 2 and 4. Growing beyond Day 4 afforded no increase in GGOH suggesting that GGPP biosynthesis, measured indirectly as the excreted alcohol derivative, is contingent on the metabolic flux of the sterol biosynthetic pathway, which slows in conjunction with mitotic growth. The data indicate that the recombinant strains lacking a diterpene synthase, EHY1[pEH12.2], biosynthesized 40-60% more GGOH than the same strain further comprising the diterpene synthase.

[0156] Because strict regulation exists to maintain appropriate sterol levels, it is likely that the disturbance of the increased intracellular levels of GGPP triggered a mechanism responsible for maintaining homeostasis with regards to the rate FPP is diverted to GGPP, the intracellular GGPP levels, or the intracellular GGOH levels. The unexpected GGOH accumulation represents an unnatural occurrence in yeast cellular metabolism, and a reasonable cellular response is to counteract the perturbation.

### Example 6

### Effect of UPC2-1

[0157] The upc2-1 allele was incorporated to indirectly effect the metabolic flux of sterol biosynthesis and provide for an increased production of GGPP, GGOH and diterpene. A genetic cross by standard means in the art was performed to incorporate the upc2-1 allele into strains of different mating type having BTS1 and the soluble form of HMG-CoA reductase, both under control of an inducible promoter. That is, crosses were performed in lieu of plasmid transformations to conserve selectable markers in the host cell.

[0158] Strains carrying the upc2-1 allele, CJ2-A and SC2-1C were obtained as a generous gift from Prof. L. Parks, and genetically crossed to EHY1. The resulting strains were named EHY18 (MATa pGAL1-BTS1::his pGAL1-trHMG1::LEU2 upc2-1 ura3-52 leu2-3,112 trp1-Δ63 his3-Δ200 ade2 Gal+) and EHY19 (MATα pGAL1-BTS1::his pGAL1-trHMG1::LEU2 upc2-1 ura3-52 leu2-3,112 trp1-Δ63 his3-Δ200 ade2 Gal+). Both strains were transformed with pEH9.0 and grown in inducing media to observe the amount of biosynthesized diterpene. Both JBY575[pEH9.0] and EHY1[pEH12.2][pEH9.0] were analyzed to establish the effect of upc2-1 on diterpene and diterpene precursor production. The analyze peak corresponding to abietadiene indicated an increase of nearly three-fold in diterpene production in EHY18[pEH9.0] as compared to EHY1[pEH12.2][pEH9.0] and about 300-fold increase in diterpene production relative to JBY575[pEH9.0]. The uninduced control cultures of each strain demonstrated undetectable levels of abietadiene by GC.

### Example 7

### Optimization of Variable Parameters

[0159] The analytical method employed in the present invention improved compound recovery as compared to extraction of the cell lysate and culture media. Hydrophobic resin has been used to isolate secondary metabolites from cultures in an effort to sequester the compounds, thereby thwarting degradation. In the present invention, a porous polyaromatic resin was sterilized and added to the growth medium prior to the induction phase.

[0160] The ratio employed was about 5% (w/v) of the induced culture. The preparation of the resin included wetting with alcohol followed by sterilization. A skilled artisan is aware of methods to determine optimal weight-to-volume ratios by considering, for example, diterpene and diterpene precursor production levels relative to resin adsorbent capacity, incubation and/or growth time and the ability of the resin to adsorb and/or absorb nutrients from the medium. The wetting procedure was examined with methanol, the recommended solvent, and ethanol; better tolerated by yeast than methanol. No effect on diterpene production was observed between the use of different wetting solvents.

[0161] Optimization of the dilution factor (inoculum volume) and induction time in the presence of the resin was performed. The concentrated inoculum (1:20 dilution factor) yielded no obvious advantages to a more dilute induction volume (1:1000); therefore, the latter was used to allow for additional generations under inducing conditions. Induction time was tested at 48, 72, 96, and 105 hours. The yields of detectable diterpene benefited from longer induction times. During these experiments, the culture media and the cell lysate of cultures grown with and without resin were also extracted and analyzed for diterpenes and diterpene precursors.

[0162] The effect of the resin on the optical densities of induced cultures was determined. EHY1[pEH12.2][pEH9.0] was induced for 48 h in the presence and absence of resin. The optical density of the culture devoid of resin achieved twice the optical density of the culture containing resin. Although the induced culture lacking resin produced a higher cell mass less abietadiene was removed by extraction. In contrast, the same strain grown in the presence of the resin achieved a relatively lower cell density and produced about 1 mg/L abietadiene in vivo. The filtrate removed from the resin was also extracted to determine the efficiency with which the excreted abietadiene absorbed to the resin. An additional 15% of the total abietadiene detected from the resin eluent was detected in the extracted culture media. To compensate for binding inefficiency all samples were grown for four days unless otherwise specified. Longer incubation times did not significantly increase optical density measurements. A control of growth media containing resin but no cells was analyzed in order to assign the background contributed by the resin.

[0163] The incorporation of the resin functioned as a means to remove the excreted hydrophobic compounds of biosynthetic origin and effected nearly a seven-fold increase in recovered diterpene and diterpene precursors. In a specific embodiment, the growth of the cell is affected by the amount of GGPP accumulated, particularly in embodiments affecting prenylation. These effects occur if a toxic diterpene hydrocarbon is produced at a faster rate than the rate of secretion to the medium. However, ready transport of the accumulated diterpene precursor, GGPP hydrolyzed to GGOH, has been observed. Furthermore, the surface capacity and chemical characteristics of the adsorbent resin effects recovery. Modifying the type of resin the ratio employed in the medium is within the skill of one with ordinary skill in the art. Furthermore, a skilled artisan is aware of growth conditions or alterations within the cell itself to circumvent difficulties as a result of deleterious saturation or toxic levels.

### Example 8

### Abietadiene Production Versus Galactose Concentration

[0164] The production of abietadiene, which reflects the production levels of GGPP, is influenced by the amount of inducer available. Induced cultures of EHY18[pEH9.0] grown in medium comprising various initial galactose concentrations were tested. Specifically, induced cultures containing 2%, 4%, and 8% galactose concentrations were analyzed in triplicate. The same strain comprising the GGPP synthase, the soluble form of HMG1 and the upc2-1 allele but lacking the diterpene cyclase (EHY18) was grown under similar inducing conditions to determine background. No diterpene was detected in the strain lacking the diterpene cyclase.

[0165] Abietadiene production in EHY18[pEH9.0] reached a maximum in the 4% galactose culture by increasing nearly two-fold over the amount of abietadiene detected in the 2% galactose culture. The 8% galactose culture did not induce a significant increase in the amount of abietadiene detected as compared to the 4% galactose culture. The experiment indicated that a two-fold increase in diterpene production resulted from cultivating with increased amounts of inducer (i.e., galactose).

[0166] The diterpene production in the compositions of the present invention effected growth rates and saturation levels. Optical densities of induced cultures expressing abietadiene synthase, EHY18[pEH9.0], were compared to optical densities of induced cultures lacking the cyclase activity, EHY18. The induced EHY18 and EHY18[pEH9.0] cultures grown in various galactose compositions were measured (λ=600 nm) for cell density prior to sample processing. The optical density measurements of EHY18 and EHY18[pEH9.0] were significantly increased in 4% inducing media relative to 2% inducing media. Comparing measurements of the two strains in all galactose concentrations suggested that consumption of the diterpene precursors by an incorporated diterpene synthase effected higher optical densities.

### Example 9

### Methods of Analysis

[0167] Removal of diterpene and diterpene precursors was demonstrated using both organic extraction, and a modified procedure as provided herein based on that described in Hara et al. (1989).

[0168] Terpene Accumulation Assay

[0169] Small-scale analysis of terpene accumulation involved growing an uninduced culture of a strain at 30° C. in 5 mL dextrose and synthetic complete media lacking uracil. Those strains bearing plasmid-borne nucleic acid sequences were grown at 30° C. in 5 mL dextrose and synthetic complete media with appropriate selection. The saturated culture was harvested by centrifugation (1500×g, 3 min); the cell pellet was rinsed twice with 500 μL sterile deionized water to remove residual media. The cells were then resuspended in 5 mL sterile deionized water. This suspension was used as inoculum in a 1:1000-fold dilution (5 μL) into 5 mL induction media. The induction media contained equal volumes of 2×galactose (G) and 2×synthetic complete media (SC) lacking uracil added to a 25 mL Corex tube pre-prepared with HP-20 diaion resin (˜0.35 g wet resin was weighed into a clean Corex tube then overlaid with methanol and allowed to incubate for 15 min; methanol was removed and the resin was rinsed twice with deionized water. The resin was overlaid with 600 μL deionized water and autoclaved 15 min).

[0170] The saturated cultures were filtered through a Kontes chromatograph column (2.8×25 cm) to remove cellular debris and growth media. The captured resin was rinsed with copious amounts of water then eluted thrice with 2 mL ethanol. Ethanolic eluents were combined and extracted with pentane or hexane. The organic extracts were combined and dried at ambient temperatures under a nitrogen stream.

[0171] The large-scale assays were performed as described for the small-scale assay except the filtering apparatus varied. Large glass chromatograph columns (3×40 cm) were used to filter cells and growth media from the resin. Elution of the organics from the resin was achieved by passing 300-500 mL ethanol over the resin. The eluent was then extracted thrice with pentane. The combined organic extracts were dried over MgSO₄, condensed in vacuo, and stored under nitrogen at −20° C.

[0172] Analytical Instrumentation

[0173] GC analysis was performed on an HP 6890 series equipped with an Rtx-5 capillary column (30 m×0.25 mm i.d., 0.1 μm df), a FID detection system with a split ratio of 1:40 (helium was used as carrier). The oven utlized program with relative to the size of the terpene molecule under observation. Sesquiterpene detection employs the following oven program: 70° C. for 1 min, 15° C./min increase to 250° C. and hold for 3 min. Both injector and detector were set to 250° C. Diterpenes were separated for detection using a temperature program with an initial temperature of 150° C. for 5 min, then 5° C./min increase to 250° C. and hold for 5 min. Injector and detector temperatures were held at 250° C. Longifolene (0.25 mg/mL) served as the internal standard. Standards for longifolene, geraniol, farnesol, and geranylgeraniol were obtained from Sigma Chemical Company (St. Louis, Mo.).

[0174] GC/MS analysis was performed on VG ZAB-HF GC-MS, and the GC oven program was utilized. The capillary column was purchased from J&W Scientific (Folsom, Calif.) (DB-Sms (60 m×0.25 mm i.d., 0.1 mm df)). Transfer lines were set to the injector temperature. Ionization by electron-impact (EI) was achieved at 70 eV with a scan time of 4.0 sec.

### Example 10

### Characterization of Diterpene and Diterpene Precursors

[0175] A 1-L induced culture of EHY18[pEH9.0] was grown under conditions wherein diterpene and diterpene precursors were produced. The resin eluent was purified for the major product (5 mg, 85% pure) and confirmed by ¹H-NMR to be biosynthetic 7,13-abietadiene (FIG. 9). The abietadiene fraction contained at least three biosynthetic products possessing m/z=272 by GC/MS analysis. The major compound (97% relative ratio) was confirmed to be 7,13-abietadiene. An isomer (3% relative ratio) of biosynthetic origin produced a fragmentation pattern that corresponded to neoabietadiene. In addition, NMR data demonstrated an upfield methyl singlet (δ0.629 ppm) indicated the presence of another isomer possessing, most likely, a double bond at the C-7 position. No evidence of levopimaradiene was found despite significant production of this isomer detected upon expression of a truncated abietadiene synthase and in vitro incubation with substrate (Ravn et al., 1998).

### Example 11

### Altering Sterol Metabolism Upstream of GGPP

[0176] The unicellular organisms of the present invention demonstrate improved production of diterpenes and diterpene precursors in vivo. Efforts to increase the production yields further comprised minimizing the effect of competing biosynthetic processes on endogenous GGPP levels. Geranylgeranyl pyrophosphate results from the head-to-tail condensation of isopentenyl pyrophosphate and farnesyl pyrophosphate (FPP). However, the majority of FPP is consumed in biosynthesis of squalene.

[0177] The formation of squalene results from the head-to-head condensation of two molecules of FPP; the two-step transformation is catalyzed by squalene synthase and constitutes a branch point in the sterol biosynthetic pathway. Commonly, branch point transformations represent highly regulated steps in a metabolic pathway and, thus, deletion of such are avoided. Squalene synthase, also referred to as farnesyl diphosphate:farnesyl diphosphate farnesyl-transferase, is encoded by ERG9 in yeast and is a likely regulatory site for sterol biosynthesis. It is known that squalene synthase is inhibited by a variety of compounds, including analogs of FPP (Corey and Volante, 1976; Ortiz de Montellano et al., 1977; Bertolino et al., 1978). Intermediates between FPP and squalene are well known in the art and are also the target of inhibition (Rilling, 1966; Popjak et al., 1969; Epstein and Rilling, 1970). Examples of ERG9 inhibitors include squalestatin I, farnesylamine, dodecylamine, and cis-N-farnesyl aminoethyl morpholine.

[0178] In a specific embodiment, at least one ERG9 (squalene synthase) (GenBank Accession No. X59959; SEQ ID NO:409) modification is generated by standard means in the art to create a “bottleneck” in the pathway, thereby permitting the shuttling of increased amounts of FPP to the bioengineered diterpene pathway. One means to partially block a transformation is achieved by employing a temperature-sensitive mutation which allows examination of impaired enzymatic activity without the adverse effect of completely blocking metabolism. Temperature-sensitive mutations weaken an enzyme's secondary structure. The resultant protein becomes especially sensitive to thermal denaturation, thereby rendering its activity temperature-sensitive. A temperature-sensitive ERG9 mutation (Karst et al., 1971) was incorporated by genetic cross into the yeast comprising a chromosomal nucleic acid sequence encoding a GGPP synthase under the control of an inducible promoter. A strain comprising the erg9-1 (SEQ ID NO:413) temperature-sensitive mutation was purchased from American Type Culture Collection (ATCC 64031) and tetrads from the genetic crosses were selected by observing growth rate at various temperatures as compared to the control strain EHY1.

[0179] Optimal growth temperature was determined on solid media and indicated that above 36° C. was lethal to the engineered yeast comprising the erg9-1 temperature-sensitive mutation. The diterpene and diterpene precursor production of the strains comprising the erg9-1 allele were referenced to the production yields observed at 30° C. incubation temperature.

[0180] Strains further comprising the chromosomal nucleic acid sequence encoding the GGPP synthase under control of an inducible promoter benefited from longer incubation times. An initial 24 h incubation at 30° C. was determined to be advantageous to diterpene production in all strains comprising the temperature-sensitive erg9-1 allele.

[0181] The strain comprising the erg9-1 allele, the upc2-1 allele, the chromosomal nucleic acid sequence encoding the GGPP synthase under control of the inducible promoter, the plasmid-borne nucleic acid sequence encoding the soluble form of HMG1 under control of an inducible promoter and the plasmid-borne nucleic acid sequence encoding the diterpene synthase under control of an inducible promoter yielded an increase in detectable GGOH relative to the control strain suggesting that an increase in the native metabolic rate of sterol biosynthesis is critical for diterpene precursor accumulation. However, the same strain produced lower levels of detectable abietadiene than the analogous strain lacking the nucleic acid sequence encoding the soluble form of HMG1. Negligible amounts of diterpene and diterpene precursors were produced in the strain comprising the erg9-1 allele, the nucleic acid sequence encoding the GGPP synthase and the nucleic acid sequence encoding the diterpene synthase.

### Example 12

### Sterol Production in Metabolically Engineered Yeast

[0182] Determining the amount of ergosterol biosynthesized in the engineered strains of the present invention indicated that metabolic flux of the sterol biosynthetic pathway is increased as compared to metabolic flux of native sterol biosynthesis (Table 3). Ergosterol is the end product of sterol biosynthesis in yeast. Quantifying the amount of ergosterol in the organisms modified to produce diterpenes and diterpene precursors allows one of ordinary skill on the art to monitor the effect of the genetic modifications on sterol metabolism as a whole. This is critical to maintaining a healthy and stabile engineered organism. Induced cultures of JBY575[pEH9.0], EHY1[pEH12.2][pEH9.0], EHY18[pEH9.0], and EHY32[pEH9.0] were evaluated for total ergosterol content. Saponification of 50 mL induced cultures grown without resin afforded approximately 1 mg total sterol. Reaction products were silylated, analyzed by GC and compared to silylated ergosterol prepared at known concentrations. Native yeast expressing the diterpene synthase under the control of an inducible promoter established the ergosterol level for an intact sterol biosynthetic pathway. Comparatively, a 4.5-fold increase in ergosterol levels were observed in the yeast overexpressing the soluble form of HMG1 under control of the GAL1 promoter and comprising the upc2-1 allele.

[0183] Other means by which an end product is isolated and/or analyzed are known in the art. For example, accumulating sterol is often esterified for storage, and thus a reaction was employed that allowed hydrolysis of accumulating ergosteryl ester and subsequent detection of both free and esterified ergosterol. The increase in ergosterol content demonstrated by EHY18[pEH9.0] suggests that the rate of sterol biosynthesis therein is producing a diterpene precursor in an amount sufficient for circumventing to diterpene production in vivo beyond that which is exploited by the modifications described herein. This suggests that further modifications, such as those described in EXAMPLE 13, to divert the accumulating pool of diterpene precursor are advantageous to diterpene production yields.

### Example 13

### Inhibition of Other FPP-Associated Pathways

[0184] It is known that intermediates such as GGPP and FPP are shared by multiple pathways (Keller, 1996). In a preferred embodiment, at least one other metabolic pathway associated with FPP is modified so that increased or enhanced flux occurs into the FPP to GGPP bioengineered pathway. In one embodiment of the present invention, modification is defined as incomplete inhibition, and in an alternative embodiment modification is defined as complete inhibition. In a preferred embodiment, the endogenous FPP-associated pathway(s) is not modified to the extent that said modification(s) is deleterious to the cell. Alternatively, the pathway is modified to a deleterious extent, but the required product(s) is provided by another means. In specific embodiments, the activity of a particular enzyme and/or the expression of the nucleic acid sequence which encodes it is decreased or downregulated, respectively. In other embodiments, there is an alteration in a nucleic acid sequence which encodes a particular enzyme, there is an alteration in expression of a nucleic acid sequence which encodes a particular enzyme, there is an alteration in translation or proteolysis of the enzyme, or a combination thereof. The term “alteration” as used herein is defined as a change in the function of a nucleic sequence and/or the amino acid sequence which is encoded by it. Non-limiting examples of alterations include a mutation, such as a point mutation, frameshift mutation, nonsense mutation, temperature-sensitive mutation, a deletion, an inversion, a change in regulation of a nucleic acid sequence through modification of regulatory elements, or a combination thereof.

[0185] In one embodiment of the present invention, an inducible promoter was inserted onto a chromosome such that the promoter was operatively linked to the chromosomal squalene synthase in S. cerevisiae. The inducible promoter, CUP1, has been described as regulating competitive transcriptional levels relative to the constitutive GAPDH promoter and has been employed in functional gene characterization. The CUP1 promoter induces expression as a function of intracellular copper content, and thus in a specific embodiment, an inducer is a copper salt, and preferably cupric sulfate.

[0186] A skilled artisan is aware that modification of the metabolic pathway is achieved by negatively affecting enzyme activity, either partially or completely, or by decreasing expression of the nucleotide sequence which encodes the enzyme, all of which employ standard and well known methods in the art in yeast. That is, inhibition of steps in metabolic pathways are accomplished, for example, via genetics, such as by generating a mutation or deletion of the nucleic acid sequence which encodes the enzyme, by downregulating the expression of the nucleic acid sequence which encodes the enzyme, or by administering to the cell an inhibitor of the enzyme function and/or activity. In another embodiment, different growth parameters are altered to attain at least one growing condition to decrease activity of a sensitive enzyme. Such parameters include oxygen availability, temperature, carbon source and amount, and the like.

[0187] Potential target sites include inhibition of enzymes at any point in the pathway, but preferably at a transformation that consumes FPP, and more preferably consumes FPP as a substrate. Examples of such pathways include the squalene synthase pathway and the pathway which converts high-molecular weight precursors of dolichols and ubiquinones, and the prenylation pathway.

[0188] In one embodiment, a sterol biosynthetic pathway is inhibited, such as in the squalene synthase pathway, to increase FPP flux into the engineered GGPP biosynthesis pathway. Similarly, ERG1 (squalene epoxidase) (GenBank Accession No. M64994; SEQ ID NO:410) consumes squalene for sterol biosynthesis and such is a target for separate or additional alteration to increase levels of FPP for GGPP biosynthesis. In alternative embodiments additional enzymatic steps are modified, wherein the enzymatic steps are known in the art and/or are identified by standard screens known in the art, such as those described herein. Other sites contemplated for modification of the squalene synthase pathway include squalene epoxidase (ERG1) and/or lanosterol synthase (ERG7) (GenBank Accession No. U04841; SEQ ID NO:411).

### Example 14

### upc2-1 Alternatives

[0189] In a specific embodiment, there is a yeast cell for producing GGPP in vivo, comprising a nucleic acid sequence encoding a GGPP synthase, a nucleic acid sequence encoding a soluble form of HMG-CoA reductase and a nucleic acid sequence that confers an increase in sterol metabolic flux as compared to native sterol metabolic flux levels. The increase in sterol metabolic flux includes increased production in vivo of acetate, mevalonate, hydroxymethylglutaryl coenyzme A, isopentenyl pyrophosphate, dimethylallyl pyrophosphate, geranyl pyrophosphate, farnesyl pyrophosphate and geranylgeranyl pyrophosphate. A nucleic acid sequence that confers an increase in the production of these intermediates effect the sterol metabolic flux to the extent that diterpene and diterpene precursor production is increased as compared to native sterol metabolic flux levels.

[0190] In another specific embodiment, there is a yeast cell for producing a diterpene in vivo, comprising an exogenous nucleic acid sequence encoding GGPP synthase and an exogenous nucleic acid sequence encoding a diterpene synthase. In a further embodiment, the cell further comprises an exogenous nucleic acid sequence encoding a HMG-CoA reductase. In a preferred embodiment, the HMG-CoA reductase is containing a deletion wherein the deletion affords a more soluble form of the reductase as compared to the native reductase. In a further embodiment, the cell further comprises an exogenous nucleic acid sequence that encodes a gene product which confers to said cell an increase in sterol biosynthesis. In yet another specific embodiment, the cell further comprises an exogenous nucleic acid sequence the encodes a gene product which confers to said cell sterol importation under aerobic conditions. Thus, although the upc2-1 allele is utilized in the compositions and methods of the present invention for increasing sterol biosynthesis (increasing sterol metabolic flux), the allele is reported to additionally overcome control of the sterol import/export mechanism. In an alternative embodiment, two separate alleles which confer both phenotypes, or a different single allele which confers both phenotypes. For instance, a genetic mutation in the heme biosynthetic pathway mimics the effect of anaerobic growth and permits importation of exogenous sterols (Parks and Casey, 1995).

[0191] Alternatively, a sterol uptake gene (SUT1) has been described as permitting importation of exogenous sterols (Karst et al., 1995). And, more recently this same gene is purported to upregulate sterol synthesis in aerobically grown S. cerevisae (Ness et al., 2001). Thus, the observed ability for SUT1 to confer an increase in sterol synthesis suggests that this gene product increases sterol metabolic flux levels as compared to native sterol flux levels. The ability to overcome the sterol import/export mechanism affords the recombinant organism particular advantages in that further modifications to increase metabolic flux, diterpene precursor and/or diterpene production include targeting sites along the pathway that effect adversely sterol flux, such as highly regulated enzymatic steps (i.e., squalene synthase).

### Example 15

### Methods to Screen for Other Diterpene Synthases

[0192] In another embodiment of the present invention, there is a method of isolating a diterpene synthase, comprising the steps of growing a plurality of cells which express a geranylgeranyl pyrophosphate synthase in the presence of a polyaromatic resin to make a cell/resin mixture, wherein at least one of the cells further comprises at least one nucleic acid sequence of a yeast expression library, wherein the expression of the nucleic acid sequence is regulated by an inducible promoter and under conditions wherein the expression is induced; filtering the cell/resin mixture; extracting the cell/resin mixture with alcohol to produce an organic eluent; analyzing the organic eluent by a screening method, wherein the screening method is selected from the group consisting of chromatography, spectroscopy, or a combination thereof, and wherein the screening method identifies said diterpene synthase. A skilled artisan recognizes that yeast expression libraries are known, and methods to construct a yeast expression library are also known in the art and within the skill of a skilled artisan in the art. Furthermore, by the examples in Example 5, a skilled artisan is aware of methods to identify a diterpene synthase from processing of a cell/resin mixture include, for example, gas chromatography, gas chromatography/mass spectroscopy, and thin layer chromatography. Chromatography screens have been described by Corey et al. (1993).

### Example 16

### Summary of the Present Invention

[0193] Thus, in accordance with the objects of the present invention, there is an in vivo system for producing diterpenes and diterpene precursors. In a preferred embodiment, there is a yeast cell, wherein the yeast cell comprises a GGPP synthase such as BTS1, a soluble form of HMG-CoA reductase, and an allele that confers an increase in sterol metabolic flux, that produces exploitable amounts of diterpene precursor occurs in a cell, which does not naturally biosynthesize the increased amount of diterpene precursor.

[0194] In another preferred embodiment, there is a yeast cell, wherein the yeast cell comprises a GGPP synthase such as BTS1, a soluble form of HMG-CoA reductase, upc2-1 and a diterpene synthase that produces exploitable amounts of diterpene is produced in a cell, which does not naturally biosynthesize the diterpene. As described herein, hydrolysis of accumulating GGPP to GGOH has been observed in the compositions of the present invention. Diterpene production levels in vivo are a function of inducer concentration, metabolic flux, reaction rates of rate-limiting steps. Furthermore, diterpene and diterpene precursor yields are a function of the isolation and removal methods.

### REFERENCES

[0195] All patents and publications mentioned in the specification are indicative of the levels of those skilled in the art to which the invention pertains. All patents and publications are herein incorporated by reference to the same extent as if each individual publication was specifically and individually indicated to be incorporated by reference herein.

### Patents

[0196] U.S. Pat. No. 4,683,202 issued Jul. 28, 1987.

[0197] U.S. Pat. No. 4,879,236 issued Nov. 7, 1989.

[0198] U.S. Pat. No. 5,429,939 issued Jul. 4, 1995.

[0199] U.S. Pat. No. 5,589,581 issued Dec. 31, 1996.

[0200] U.S. Pat. No. 5,871,986 issued Feb. 16, 1999.

[0201] U.S. Pat. No. 5,925,565 issued Jul. 20, 1999.

[0202] U.S. Pat. No. 5,928,906 issued Jul. 27, 1999.

[0203] U.S. Pat. No. 5,935,819 issued Aug. 10, 1999.

[0204] EP Patent No. EP0393690 issued Oct. 24, 1990.

[0205] EP Patent No. EP0769551 issued Apr. 23, 1997.

### PUBLICATIONS

[0206] Ausubel, F. M., Brent, R., Kingston, R. E., Moore, D. D., Seidman, J. G., Smith, J. A., Struhl, K. (1994). Current Protocols in Molecular Biology, John Wiley & Sons, Inc.

[0207] Bailey, J. E. (1991) Toward a Science of Metabolic Engineering. Science 252: 1668-1675.

[0208] Bask, K., Nah, J., Lee, S. B., Song, J. H., Shin, D. H., Kim, H. V. (2000) Mol Cells 10(2):220-225.

[0209] Basson, M. E., Thorsness, M., Rine, J. (1986) Saccharomyces cerevisiae contains two functional genes encoding 3-hydroxy-3-methylglutaryl-coenzyme A reductase. Proc. Natl. Acad. Sci. USA 83: 5563-67.

[0210] Basson, M. E., Moore, R. L., O'Rear, J., Rine, J. (1987) Identifying mutations in duplicated functions in Saccharomyces cerevisiae: recessive mutations in HMG-CoA reductase genes. Genetics 117: 645-655.

[0211] Bensen, R. J., Johal, G. S., Crane, V. C., Tossberg, J. T., Schnable, P. S., Meeley, R. B., Briggs, S. P. (1995) Plant Cell 7:75-84.

[0212] Bertolino, A., Altman, L. J., Vasak, J., Billing, H. C. (1978) Bioch. Biophys. Acta 530:17-23.

[0213] Bourot, S., Karst, F. (1995) Gene. 7:165(1):97-102.

[0214] Burke, D., Dawson, D., Stearns, T. (2000) Methods in Yeast Genetics, 2000 Edition: A Cold Spring Harbor Laboratory Course Manual, Cold Spring Harbor Laboratory, 205 pp.

[0215] Cherest, H., et al. (1985) Gene 34: 269-81.

[0216] Corey, E. J., Volante, R. P. (1976) J. Am. Chem. Soc. 98:1291-1293.

[0217] Corey E J, Matsuda S P, Bartel B. (1993) Isolation of an Arabidopsis thaliana gene encoding cycloartenol synthase by functional expression in a yeast mutant lacking lanosterol synthase by the use of a chromatographic screen. Proc Natl Acad Sci USA., 90(24):11628-32.

[0218] Epstein, W. W., Rilling, H. C. Studies on the mechanism of squalene biosynthesis. (1970) J. Biol. Chem. 245(18): 4597-4605.

[0219] Funk, C., Croteau, R. (1994) Arch. Biochem. Biophys. 308: 258-66.

[0220] Goldstein, J. L., Brown, M. S. Regulation of the mevalonate pathway. Nature 343: 425-430.

[0221] Hampton, et al. (1999) J. Biol. Chem. 274:31671-8.

[0222] Hara, M., Asano, K., Kawamoto, I., Takiguchi, T., Katsumata, S., Takahashi, K.-I., Nakao, H. (1989) J. Antibiotics 42:1768-1774.

[0223] Hill, A. M., Cane, D. E., Mau, J., West, C. A. (1996) Arch. Biochem. Biophys. 336:283-289.

[0224] Hottiger, T., Frst, P., Pohlig, G., Heim, J. (1994) Yeast 10: 283-296.

[0225] Jiang, Y, Proteau, P, Poulter, D, Ferro-Novick, S. BTS1 encodes a geranylgeranyl diphosphate synthase in Saccharomyces cerevisiae. (1995) J. Biol. Chem. 270 (37): 21793-21799.

[0226] Keller, R. K. Squalene synthase inhibition alters metabolism of nonsterols in rat liver. (1996) Bioch. Biophys. Acta 1303:169-179.

[0227] Leak, F. W., Tove, S., Parks, L. W. In yeast, upc2-1 confers a decrease in tolerance to LiCl and NaCl, which can be suppressed by the p-type ATPase encoded by ENA2. (1999) DNA Cell Biol. 18(2): 133-139.

[0228] Lewis T. L., Keesler G. A., Fenner G. P., Parks L. W. Pleiotropic mutations in Saccharomyces cerevisiae affecting sterol uptake and metabolism. (1988) Yeast 4(2):93-106.

[0229] Liu, S.-J., Steinbuchel, A. A novel genetically engineered pathway for synthesis of poly (hydroxyalkanoic acids) in Escherichia coli. (2000) Appl. Env. Microbiol. 66(2): 739-743.

[0230] Maniatis, T., Sambrook, J., Fritsch, E. F. (1989) Molecular Cloning: A Laboratory Manual, Cold Spring Harbor Laboratory.

[0231] Miura, Y, Kondo, K, Shimada, H, Saito, T, Nakamura, K, Misawa, N. Production of lycopene by the food yeast, Candida utilis that does not naturally synthesize carotenoid. (1998b) Biotech. Bioeng. 58(2, 3): 306-308.

[0232] Miura, Y., Kondo, K., Saito, T., Shimada, H., Fraser, P. D., Misawa, N. Production of the carotenoids lycopene, β-carotene, and astaxanthin in the food yeast Candida utilis. (1998a) Appl. Envir. Microbiol. 64(4): 1226-1229.

[0233] Mountain, H. A. et al. (1991) Yeast 7:781-803.

[0234] Ness F, Bourot S, Regnacq M, Spagnoli R, Berges T, Karst F. SUT1 is a putative Zn[II]2Cys6-transcription factor whose upregulation enhances both sterol uptake and synthesis in aerobically growing Saccharomyces cerevisiae cells. Eur J Biochem 2001 March;268(6):1585-95

[0235] Ortize de Montellano, P. R., Wei, J. S., Vinson, W. A., Castillo, R., Boparai, A. S. (1977) Biochemistry 16: 2680-2685.

[0236] Parks, L. W., Casey, W. M. Physiological implications of sterol biosynthesis in yeast. (1995) Annu. Rev. Microbiol. 49:95-116.

[0237] Parks, L. W., Smith, S. J., Crowley, J. H. Biochemical and physiological effects of sterol alterations in yeast-a review. (1995) Lipids 30(3): 227-230.

[0238] Paultauf, F., Kohlwein, S. D., Henry, S. A. (1992) Regulation and compartmentalization of lipid synthesis in yeast. In The Molecular and Cellular Biology of the Yeast Saccharomyces: Gene Expression. 2:415-500. Cold Spring Harbor, N.Y.: Cold Spring Harbor Lab.

[0239] Polakowski, T., Stahl, U., Lang, C. (1998) Appl. Microbiol. Biotechnol. 49: 66-71.

[0240] Poletti, A., Celotti, R., Motta, M., Martini, L. Biochem. J. 1996, 314, 1047-1052.

[0241] Popjak, G., Edmond, J., Clifford, K., Williams, V. (1969) Biosynthesis and structure of a new intermediate between farnesyl pyrophosphate and squalene. J. Biol. Chem. 244(7): 1897-1918.

[0242] Profant, D. A., Roberts, C. J., Koning, A. J., Wright, R. L. (1999) The role of the 3-hydroxy 3-methylglutaryl coenzyme A reductase cytosolic domain in karmellae biogenesis. Mol Biol Cell 10(10): 3409-23.

[0243] Rae, T. D., Schmidt, P. J., Pufahl, R. A., Culotta, V. C., O'Halloran, T. V. (1999) Science 284: 805-808.

[0244] Rilling, H. C. A new intermediate in the biosynthesis of squalene (1966) J. Biol. Chem. 241 (13):3233-3246.

[0245] Shimada, H., Kondo, K., Fraser, P. D., Miura, Y., Saito, T., Misawa, N. Increased carotenoid production by the food yeast Candida utilis through metabolic engineering of the isoprenoid pathway. (1998) Appl. Environ. Microbiol. 64(7): 2676-2680.

[0246] Stephanopolous, G. (2000) Bioinformatics and Metabolic Engineering. Metabol. Eng. 2(3): 157-158.

[0247] Stoffer-Vogel, B., Wildung, M. R., Vogel, G. (1996) J. Biol. Chem. 271: 23262-23268.

[0248] Sun, T.-P., Kamiya, Y. (1994) Plant Cell 6:1509-1518.

[0249] Wang, C.-W., Oh, M.-K., Liao, J. C., Engineered isoprenoid pathway enhances astaxanthin production in Escherichia coli. (1999) Biotech. Bioeng. 62(2): 235-308.

[0250] Yamaguchi, S., Saito, T., Abe, H., Yamane, H., Murofushi, N., Kamiya, T. (1996) Plant J. 10: 203-213.

[0251] Yamano, S., Ishii, T., Nakagawa, M., Ikenaga, H., Misawa, N. Metabolic engineering for production of β-carotene and lycopene in Saccharomyces cerevisiae. (1994) Biosci. Biotech. Biochem. 58 (6): 1112-1114.

[0252] One skilled in the art readily appreciates that the patent invention is well adapted to carry out the objectives and obtain the ends and advantages mentioned as well as those inherent therein. Yeast cells, cell cultures, sequences, methods, procedures and techniques described herein are presently representative of the preferred embodiments and are intended to be exemplary and are not intended as limitations of the scope. Changes therein and other uses will occur to those skilled in the art which are encompassed within the spirit of the invention or defined by the scope of the pending claims.

What is claimed:

1. A unicellular organism for producing a diterpene, comprising:
an exogenous nucleic acid sequence encoding a geranylgeranyl pyrophosphate synthase under the control of a promoter operable in said organism; and
an exogenous nucleic acid sequence encoding a diterpene synthase under the control of a promoter operable in said organism.

2. The unicellular organism of claim 1, wherein said nucleic acid sequence encoding said geranylgeranyl pyrophosphate synthase is SEQ ID NO:1, SEQ ID NO:2, SEQ ID NO:3, SEQ ID NO:4, SEQ ID NO:5, SEQ ID NO:6, SEQ ID NO:7, SEQ ID NO:8, SEQ ID NO:9, SEQ ID NO:10, SEQ ID NO:11, SEQ ID NO:12, SEQ ID NO:13, SEQ ID NO:14, SEQ ID NO:15, SEQ ID NO:16, SEQ ID NO:17, SEQ ID NO:18, SEQ ID NO:19, SEQ ID NO:20 or SEQ ID NO:21.

3. The unicellular organism of claim 1, wherein said nucleic acid sequence encoding said diterpene synthase is SEQ ID NO:361; SEQ ID NO:362; SEQ ID NO:412; SEQ ID NO:363; SEQ ID NO:364; SEQ ID NO:365; SEQ ID NO:366; SEQ ID NO:367; SEQ ID NO:368; SEQ ID NO:369; SEQ ID NO:370; SEQ ID NO:371; SEQ ID NO:372; SEQ ID NO:373; SEQ ID NO:374; SEQ ID NO:375; SEQ ID NO:376; SEQ ID NO:377; SEQ ID NO:378; SEQ ID NO:379; SEQ ID NO:380; SEQ ID NO:381; SEQ ID NO:382 or SEQ ID NO:397.

4. The unicellular organism of claim 1, wherein said promoter of said nucleic acid sequence encoding said geranylgeranyl pyrophosphate synthase is an inducible promoter or a constitutive promoter.

5. The unicellular organism of claim 4, wherein said inducible promoter is selected from the group consisting of GAL1, CUP1 and MET3.

6. The unicellular organism of claim 4, wherein said constitutive promoter is selected from the group consisting of ADH and PGK.

7. The unicellular organism of claim 1, wherein said promoter of said nucleic acid sequence encoding said diterpene synthase is an inducible promoter or a constitutive promoter.

8. The unicellular organism of claim 7, wherein said inducible promoter is selected from the group consisting of GAL1, CUP1 and MET3.

9. The unicellular organism of claim 7, wherein said constitutive promoter is selected from the group consisting of ADH and PGK.

10. The unicellular organism of claim 1, wherein said unicellular organism further comprises an exogenous nucleic acid sequence encoding a soluble form of an HMG-CoA reductase under control of a promoter operable in said organism.

11. The unicellular organism of claim 10, wherein said promoter is an inducible promoter or a constitutive promoter.

12. The unicellular organism of claim 11, wherein said inducible promoter is selected from the group consisting of GAL1, CUP1 and MET3.

13. The unicellular organism of claim 11, wherein said constitutive promoter is selected from the group consisting of ADH and PGK

14. The unicellular organism of claim 10, wherein said unicellular organism further comprises an exogenous nucleic acid sequence that confers to said organism an increase in sterol metabolic flux as compared to native sterol metabolic flux levels.

15. The unicellular organism of claim 1, wherein said nucleic acid sequence encoding said geranylgeranyl pyrophosphate synthase is present on a chromosome of said unicellular organism.

16. The unicellular organism of claim 1, wherein said unicellular organism is a yeast.

17. The unicellular organism of claim 10, wherein said unicellular organism is a yeast.

18. The unicellular organism of claim 14, wherein said unicellular organism is a yeast.

19. A unicellular organism for producing a diterpene precursor, comprising:
an exogenous nucleic acid sequence encoding a geranylgeranyl pyrophosphate synthase under the control of an inducible promoter operable in said organism;
an exogenous nucleic acid sequence encoding a soluble form of HMG-CoA reductase under control of an inducible promoter operable in said organism and
an exogenous nucleic acid sequence that confers to said cell an increase in sterol metabolic flux as compared to native sterol metabolic flux levels.

20. The unicellular organism of claim 19, wherein said nucleic acid sequence encoding said geranylgeranyl pyrophosphate synthase is SEQ ID NO:1, SEQ ID NO:2, SEQ ID NO:3, SEQ ID NO:4, SEQ ID NO:5, SEQ ID NO:6, SEQ ID NO:7, SEQ ID NO:8, SEQ ID NO:9, SEQ ID NO:10, SEQ ID NO:11, SEQ ID NO:12, SEQ ID NO:13, SEQ ID NO:14, SEQ ID NO:15, SEQ ID NO:16, SEQ ID NO:17, SEQ ID NO:18, SEQ ID NO:19, SEQ ID NO:20 or SEQ ID NO:21.

21. The unicellular organism of claim 19, wherein said organism is a yeast.

22. A unicellular organism for producing a diterpene precursor, comprising:
an exogenous nucleic acid sequence encoding a geranylgeranyl pyrophosphate synthase under the control of an inducible promoter operable in said organism;
an exogenous nucleic acid sequence encoding a soluble form of HMG-CoA reductase under control of an inducible promoter operable in said organism and
a upc2-1 nucleic acid sequence.

23. The unicellular organism of claim 22, wherein said nucleic acid sequence encoding said geranylgeranyl pyrophosphate synthase is SEQ ID NO:1, SEQ ID NO:2, SEQ ID NO:3, SEQ ID NO:4, SEQ ID NO:5, SEQ ID NO:6, SEQ ID NO:7, SEQ ID NO:8, SEQ ID NO:9, SEQ ID NO:10, SEQ ID NO:11, SEQ ID NO:12, SEQ ID NO:13, SEQ ID NO:14, SEQ ID NO:15, SEQ ID NO:16, SEQ ID NO:17, SEQ ID NO:18, SEQ ID NO:19, SEQ ID NO:20 or SEQ ID NO:21.

24. The unicellular organism of claim 22, wherein said organism is a yeast.

25. A unicellular organism for producing a diterpene or diterpene precursor, comprising:
an exogenous nucleic acid sequence encoding a geranylgeranyl pyrophosphate synthase under the control of an inducible promoter operable in said organism;
an exogenous nucleic acid sequence encoding a diterpene synthase under the control of an inducible promoter operable in said organism;
an exogenous nucleic acid sequence encoding a soluble form of HMG-CoA reductase under control of an inducible promoter operable in said organism; and
a upc2-1 nucleic acid sequence.

26. The unicellular organism of claim 25, wherein said nucleic acid sequence encoding said geranylgeranyl pyrophosphate synthase is SEQ ID NO:1, SEQ ID NO:2, SEQ ID NO:3, SEQ ID NO:4, SEQ ID NO:5, SEQ ID NO:6, SEQ ID NO:7, SEQ ID NO:8, SEQ ID NO:9, SEQ ID NO:10, SEQ ID NO:11, SEQ ID NO:12, SEQ ID NO:13, SEQ ID NO:14, SEQ ID NO:15, SEQ ID NO:16, SEQ ID NO:17, SEQ ID NO:18, SEQ ID NO:19, SEQ ID NO:20 or SEQ ID NO:21.

27. The unicellular organism of claim 25, wherein said nucleic acid sequence encoding said diterpene synthase is SEQ ID NO:361; SEQ ID NO:362; SEQ ID NO:412; SEQ ID NO:363; SEQ ID NO:364; SEQ ID NO:365; SEQ ID NO:366; SEQ ID NO:367; SEQ ID NO:368; SEQ ID NO:369; SEQ ID NO:370; SEQ ID NO:371; SEQ ID NO:372; SEQ ID NO:373; SEQ ID NO:374; SEQ ID NO:375; SEQ ID NO:376; SEQ ID NO:377; SEQ ID NO:378; SEQ ID NO:379; SEQ ID NO:380; SEQ ID NO:381; SEQ ID NO:382 or SEQ ID NO:397.

28. The unicellular organism of claim 25, wherein said organism is a yeast.

29. A unicellular organism for producing a diterpene or diterpene precursor, comprising:
an exogenous polynucleotide sequence encoding a polypeptide having an amino acid sequence of a geranylgeranyl pyrophosphate synthase under the control of a promoter operable in said organism;
an exogenous polynucleotide sequence encoding a polypeptide having an amino acid sequence of a diterpene synthase under the control of a promoter operable in said organism;
an exogenous polynucleotide sequence encoding a polypeptide having an amino acid sequence of a soluble form of HMG-CoA reductase under control of a promoter operable in said organism; and
an exogenous polynucleotide sequence encoding a polypeptide having an amino acid sequence of gene that confers to said organism an increase in sterol metabolic flux as compared to native sterol metabolic flux levels.

30. The unicellular organism of claim 29, wherein said amino acid sequence of said geranylgeranyl pyrophosphate synthase is SEQ ID NO:22, SEQ ID NO:23, SEQ ID NO:24, SEQ ID NO:25, SEQ ID NO:26, SEQ ID NO:27, SEQ ID NO:28, SEQ ID NO:29, SEQ ID NO:30, SEQ ID NO:31, SEQ ID NO:32, SEQ ID NO:33, SEQ ID NO:34, SEQ ID NO:35, SEQ ID NO:36, SEQ ID NO:37, SEQ ID NO:38, SEQ ID NO:39, SEQ ID NO:40, SEQ ID NO:41, SEQ ID NO:42, SEQ ID NO:43, SEQ ID NO:44, SEQ ID NO:45, SEQ ID NO:46, SEQ ID NO:47, SEQ ID NO:48, SEQ ID NO:49, SEQ ID NO:50, SEQ ID NO:51, SEQ ID NO:52, SEQ ID NO:53, SEQ ID NO:54, SEQ ID NO:55, SEQ ID NO:56, SEQ ID NO:57, SEQ ID NO:58, SEQ ID NO:59, SEQ ID NO:60, SEQ ID NO:61, SEQ ID NO:62, SEQ ID NO:63, SEQ ID NO:64, SEQ ID NO:65, SEQ ID NO:66, SEQ ID NO:67, SEQ ID NO:68, SEQ ID NO:69, SEQ ID NO:70, SEQ ID NO:71, SEQ ID NO:72, SEQ ID NO:73, SEQ ID NO:74, SEQ ID NO:75, SEQ ID NO:76, SEQ ID NO:77, SEQ ID NO:78, SEQ ID NO:79, SEQ ID NO:80, SEQ ID NO:81, SEQ ID NO:82, SEQ ID NO:83, SEQ ID NO: 84 or SEQ ID NO:85.

31. The unicellular organism of claim 29, wherein said amino acid sequence of said diterpene synthase is SEQ ID NO:383; SEQ ID NO:384; SEQ ID NO:385; SEQ ID NO:386; SEQ ID NO:387; SEQ ID NO:388; SEQ ID NO:389; SEQ ID NO:390; SEQ ID NO:391; SEQ ID NO:392; SEQ ID NO:393; SEQ ID NO:394; SEQ ID NO:395; SEQ ID NO: 396 or SEQ ID NO:398.

32. The unicellular organism of claim 29, wherein said organism is a yeast.

33. A method of producing a diterpene, comprising the steps of:
growing a culture of cells, wherein at least one cell in said culture is the unicellular organism of claim 1, under conditions wherein said diterpene is produced; and
removing said diterpene from said culture.

34. The method of claim 33, wherein said growing step occurs in the presence of a polyaromatic resin.

35. The method of claim 34, wherein said polyaromatic resin is in a weight-to-volume ratio of at least about 5%.

36. The method of claim 33, wherein said removal comprises filtration or extraction.

37. The method of claim 33, wherein said organism is a yeast.

38. The method of claim 37, wherein said promoter of the nucleic acid sequence encoding said GGPP synthase and said promoter of the nucleic acid sequence encoding said diterpene synthase are both inducible GAL1 promoters, and wherein the growing step occurs in the presence of at least about 2% galactose.

39. A method of producing a diterpene, comprising the steps of:
growing a culture of cells, wherein at least one cell in said culture is the unicellular organism of claim 10, under conditions wherein said diterpene is produced; and
removing said diterpene from said culture.

40. The method of claim 39, wherein said growing step occurs in the presence of a polyaromatic resin.

41. The method of claim 40, wherein said polyaromatic resin is in a weight-to-volume ratio of about 5%.

42. The method of claim 39, wherein said removal comprises filtration or extraction.

43. The method of claim 39, wherein said cell is a yeast.

44. The method of claim 43, wherein said promoter of the nucleic acid sequence encoding said GGPP synthase, the promoter of the nucleic acid sequence encoding said diterpene synthase and the promoter of the nucleic acid sequence encoding said soluble form of said HMG-CoA reductase are inducible GAL1 promoters, and wherein the growing step occurs in the presence of at least about 2% galactose.

45. A method of producing a diterpene, comprising the steps of:
growing a culture of cells, wherein at least one cell in said culture is the unicellular organism of claim 14, under conditions wherein said diterpene is produced; and
removing said diterpene from said culture.

46. The method of claim 45, wherein said growing step occurs in the presence of a polyaromatic resin.

47. The method of claim 46, wherein said polyaromatic resin is in a weight-to-volume ratio of about 5%.

48. The method of claim 45, wherein said cell is a yeast.

49. The method of claim 48, wherein said promoter of the nucleic acid sequence encoding said GGPP synthase, the promoter of the nucleic acid sequence encoding said diterpene synthase and the promoter of the nucleic acid sequence encoding said soluble form of said HMG-CoA reductase are inducible GAL1 promoters, and wherein the growing step occurs in the presence of at least about 2% galactose.

50. A method of producing a diterpene precursor, comprising the steps of:
growing a culture of cells, wherein at least one cell in said culture is the unicellular organism of claim 19, under conditions wherein said diterpene precursor is produced.

51. The method of claim 50, wherein said growing step occurs in the presence of a polyaromatic resin.

52. The method of claim 51, wherein said polyaromatic resin is in a weight-to-volume ratio of about 5%.

53. The method of claim 50, wherein said cell is a yeast.

54. The method of claim 53, wherein said promoter of the nucleic acid sequence encoding said GGPP synthase and said promoter of the nucleic acid sequence encoding said soluble form of said HMG-CoA reductase are inducible GALL promoters, and wherein the growing step occurs in the presence of at least about 2% galactose.

55. A method of producing diterpene precursor, comprising the steps of:
growing a culture of cells, wherein at least one cell in said culture is the unicellular organism of claim 24, under conditions wherein said diterpene or diterpene precursor is produced.

56. The method of claim 52, wherein said growing step occurs in the presence of a polyaromatic resin.

57. The method of claim 53, wherein said polyaromatic resin is in a weight-to-volume ratio of at least about 5%.

58. The method of claim 52, wherein said removal comprises filtration or extraction.

59. A method of producing a diterpene or diterpene precursor, comprising the steps of:
growing a culture of cells, wherein at least one cell in said culture is the unicellular organism of claim 32, under conditions wherein said diterpene or diterpene precursor is produced.

60. A method of producing a diterpene, comprising the steps of:
growing a culture of cells, wherein said culture comprises at least one cell of claim 18, wherein a metabolic pathway in said cell comprises a process which converts farnesyl pyrophosphate to a triterpene or sterol, and wherein said process is modified, under conditions wherein said diterpene is produced; and
removing said diterpene from said culture.

61. The method of claim 60, wherein said modification of said metabolic pathway occurs at at least one enzyme selected from the group consisting of squalene synthase, squalene epoxidase and lanosterol synthase.

62. The method of claim 60, wherein said modification comprises an alteration in a nucleic acid sequence which encodes said enzyme, an alteration in expression of a nucleic acid sequence which encodes said enzyme, or an alteration in translation or proteolysis of said enzyme.

63. A method of producing a diterpene precursor, comprising the steps of:
growing a culture of cells, wherein said culture comprises at least one cell of claim 21, wherein a metabolic pathway in said cell comprises a process which converts farnesyl pyrophosphate to a triterpene or sterol, and wherein said process is modified, under conditions wherein said diterpene precursor is produced.

64. The method of claim 60, wherein said modification of said metabolic pathway occurs at an enzyme selected from the group consisting of squalene synthase, squalene epoxidase, lanosterol synthase, or a combination thereof.

65. The method of claim 60, wherein said modification comprises an alteration in a nucleic acid sequence which encodes said enzyme, an alteration in expression of a nucleic acid sequence which encodes said enzyme, or an alteration in translation or proteolysis of said enzyme.

66. A method of producing a diterpene or diterpene precursor, comprising the steps of:
growing a culture of cells, wherein said culture comprises at least one cell of claim 32, wherein a metabolic pathway in said cell comprises a process which converts farnesyl pyrophosphate to a triterpene or sterol, and wherein said process is modified, under conditions wherein said diterpene or diterpene precursor is produced.

67. The method of claim 66, wherein said modification of said metabolic pathway occurs at an enzyme selected from the group consisting of squalene synthase, squalene epoxidase, lanosterol synthase, or a combination thereof.

68. The method of claim 66, wherein said modification comprises an alteration in a nucleic acid sequence which encodes said enzyme, an alteration in expression of a nucleic acid sequence which encodes said enzyme, or an alteration in translation or proteolysis of said enzyme

69. A method of producing a diterpene, comprising the steps of:
growing a culture of cells, wherein said culture comprises at least one cell of claim 18, and wherein said cell further comprises a modification of a prenyltransferase, under conditions wherein said diterpene is produced.

70. The method of claim 69, wherein said prenyltransferase is protein farnesyltransferase, protein geranylgeranyltransferase I alpha subunit, protein geranylgeranyltransferase I beta subunit, protein geranylgeranyltransferase II alpha subunit, or protein geranylgeranyltransferase II beta subunit.

71. The method of claim 69, wherein said modification comprises an alteration in a nucleic acid sequence which encodes said enzyme, an alteration in expression of a nucleic acid sequence which encodes said enzyme, or an alteration in translation or proteolysis of said enzyme.

72. A method of producing a diterpene precursor, comprising the steps of:
growing a culture of cells, wherein said culture comprises at least one cell of claim 21, and wherein said cell further comprises a modification of a prenyltransferase, under conditions wherein said diterpene precursor is produced.

73. The method of claim 72, wherein said prenyltransferase is protein farnesyltransferase, protein geranylgeranyltransferase I alpha subunit, protein geranylgeranyltransferase I beta subunit, protein geranylgeranyltransferase II alpha subunit, or protein geranylgeranyltransferase II beta subunit.

74. The method of claim 72, wherein said modification comprises an alteration in a nucleic acid sequence which encodes said enzyme, an alteration in expression of a nucleic acid sequence which encodes said enzyme, or an alteration in translation or proteolysis of said enzyme.

75. A method of producing a diterpene, comprising the steps of:
growing a culture of cells, wherein said culture comprises at least one cell of claim 18, and wherein a hexaprenylpyrophosphate synthetase is modified, under conditions wherein said diterpene is produced.

76. The method of claim 75, wherein said modification comprises an alteration in a nucleic acid sequence which encodes said enzyme, an alteration in expression of a nucleic acid sequence which encodes said enzyme, or an alteration in translation or proteolysis of said enzyme.

77. A method of producing a diterpene precursor, comprising the steps of:
growing a culture of cells, wherein said culture comprises at least one cell of claim 21, and wherein hexaprenylpyrophosphate synthetase is modified, under conditions wherein said diterpene precursor is produced.

78. The method of claim 77, wherein said modification comprises an alteration in a nucleic acid sequence which encodes said enzyme, an alteration in expression of a nucleic acid sequence which encodes said enzyme, or an alteration in translation or proteolysis of said enzyme.

79. A method of isolating a diterpene synthase, comprising the steps of:
growing a plurality of cells of claim 21 in the presence of a polyaromatic resin to make a cell/resin mixture, wherein at least one of said cells further comprises at least one isolated and purified nucleic acid sequence of a yeast expression library, wherein the expression of said nucleic acid sequence is regulated by an inducible promoter, under conditions wherein said expression is induced;
filtering said cell/resin mixture;
extracting said cell/resin mixture with alcohol to produce an organic eluent;
analyzing said organic eluent by a screening method, wherein said screening method comprises chromatography, spectroscopy, or a combination thereof, and wherein said screening method identifies said nucleic acid sequence as encoding said diterpene synthase.

The application's sequence listing, which the Patent Office published only in electronic form, follows.

SEQUENCE LISTING (413 sequences)

SEQ ID NO: 1 - DNA, 1569 bp, Saccharomyces cerevisiae
aatattacatatagatataggacaagcccgcattttcatactgaaaggtaaacttctattattatagtggtatccaacgttcaccgcttccagcatagcagaaattacgtgtttttgcatatgttatgctgatcattgtatgcttactaccatttttctttgcttcgccttgccttctttgacgtttttttgaagcaaaaaaaaagtcaagacagatgtgcttacaaaaccatgtaaggctcattttcaaagaagctactaatagaaagagaacaaagagtttacgagtctggaaaatcaatggaggccaagatagatgagctgatcaataatgatcctgtttggtccagccaaaatgaaagcttgatttcaaaaccttataatcacatccttttgaaacctggcaagaactttagactaaatttaatagttcaaattaacagagttatgaatttgcccaaagaccagctggccatagtttcgcaaattgttgagctcttgcataattccagccttttaatcgacgatatagaagataatgctcccttgagaaggggacagaccacttctcacttaatcttcggtgtaccctccactataaacaccgcaaattatatgtatttcagagccatgcaacttgtatcgcagctaaccacaaaagagcctttgtatcataatttgattacgattttcaacgaagaattgatcaatctacataggggacaaggcttggatatatactggagagactttctgcctgaaatcatacctactcaggagatgtatttgaatatggttatgaataaaacaggcggccttttcagattaacgttgagactcatggaagcgctgtctccttcctcacaccacggccattcgttggttcctttcataaatcttctgggtattatttatcagattagagatgattacttgaatttgaaagatttccaaatgtccagcgaaaaaggctttgctgaggacattacagaggggaagttatcttttcccatcgtccacgcccttaacttcactaaaacgaaaggtcaaactgagcaacacaatgaaattctaagaattctcctgttgaggacaagtgataaagatataaaactaaagctgattcaaatactggaattcgacaccaattcattggcctacaccaaaaattttattaatcaattagtgaatatgataaaaaatgataatgaaaataagtatttacctgatttggcttcgcattccgacaccgccaccaatttacatgacgaattgttatatataatagaccacttatccgaattgtgaaataaattgatcaatcaaattagtggaggaagatagtcagaaataaagccttctctcctcctctttcgcatctatacatacgatttcatatatacgtttcattgcatcatcttttgatatatctcaaaaagatctcttagttcgcaaatagtcaaatcttcaaatttatagcctttatattttttccacgatttctgaaactcctttttatcagcaccgttaatgctagcggttactgtcaaatcgccggtaaattcgcga

SEQ ID NO: 2 - DNA, 7837 bp, Drosophila melanogaster
  misc_feature (1)..(7837): n equals unknown
aattcttggttggtttattgcaatccctgtgtaattaacaaaaaatgagctaaaaagctattttccacgcaagcaacccaattgaaatagggatggcacgtgcagctggccgattaatcgatatttagcgagggaagccaataattatatggctttttctggctactacttaaaaggttatttataaccgacttaaattaaaaaagtacatgaaataaattattttaggtaattttaatttttggcttatctggtttaataaaagttggcggaaaatagccaacatctattaagccacatttcccatctcttgtcatatcgatgatacctctacaaaaagccctcctaaccctatcgatagaaacatcgacttgcgatcatctccaatatgcaggccgcggaagaacttcaataacagtctgtttttggtctttccgtggtgtaattgatttgagttgtgcggataacgcgaaaaaccaatcgacgagcgtcggccagcaattctagtcacgcgtgtcgcgaagccaagcggtaaacaaaaagcacgccccacaccgcagtgacccccctccatcaacaccaacaccaccaccccccgcgctctatcaaaacaacaaaagcacacacgcaaggccacggcggagcagcaacaagaaaaacaacaacaacggcgacaacaatggaagaactgaacatcatattacagaagaccaaagataaatcaacgcaaaaggagcaggatgaggtacttatcccacggcttaatccttccggaccccgtgaactttgacattcgaaagtggcaagcgaacgagagacacaacagcaaactaaccagctattttggccttccttccgttctccttctttttcgacccacttcattttgggctttatttacatgtggcccacgcacgcaaaacgctatccagattctgctgcagcccttcacatacatacaacaaattcctggcaagcaattccgctctgagttggccttggccttcaatcactggttgctcataccgggcgaaaagttggcgcaaatcggaaacattgtgcaaatgctgcacaattccagtttgctgtgagtatatatcaattatctgattaatacccctatatcaaattaataccacgccaataaatcaccatgaaactacagacaatgcagtgtttttggcccaaaattgtatatactgcgtatatactctattaaaaagtttagcaaagttaacttaaccgataaatattatcataacaaagtactgactaactggcatatcaatattaaaacaaaatattttactaaaatatcacaatacatacttttgtactcactaaaaatatgtctgtaaaaaaccatataaaatcancgctagtttaaatacctgtcgatttattgccagccaactaatcagctagtcgtgctttactttttanttttgacctttgccttccttcgtttttcgctcccccattatttggctttgtttaccctgtggngggccccccccccccccccccttcaaacacaaaacacccgaacgtttgacccccaccccgttttggccacttctcctgcatgttttatctcaattcacacttgcagagtctgtatttgtatacatttggcttatttgctttcgttcagatggattccagttaaatgcctaatcgagtgtaaagttcttttgggcaagtgatgaaaacagtagagactccacgctccaaaaatgtgaaaatgctgccatatgctcgttgaagaaactcttatcatcatcagctcagttcgtttccacaacgcgcatatgttatatagaactttgctttatcatttcgttgactcactcgcatcttttcccaattggatttgaccatatacacagtctcgcacatttgtggattatttggccagagcgttgtacgctggcctcaaatcaattttcaaatttcatcatgagcccgcaggtttctctgtttacaattgaatttctttgcaatccaatgtggattcggaaattgcataaattatttagatttttcccccagggcggcctacggaggaaaagcgaagaataagatgatgttggcttgccaacaaaacagtcgcaattaaactttgaactcagccaattgaagtgtctgcgccgcttttcaattgaaggcagtaaagtgagtcgaagtgaccagggattttcgcctatcttcaggcagcagctatggaagtattcatctcgctttcaagctaatcccgtcctgcctccggccacctgtcgccattaaccattcggaggcaaacactcaggaatggccttaattctgcttaaaatccccagcattgttcctcgagacagcaggcagtctcattcctccgccaagtggcctgcatgttcttggtgttccctacttttttttttttttacgtttttagtaatgcattttcatattggcaaaaaacttagtttttacaacgacgccagcagttgcagccatagtgcctcctcgtacgaccctcgtccgtccgttcgtcattcatgcacttatgcccattgtcagttagtcaggccgtcgccagtcgacaggcattgtcacaactcttgccacgcagcccattttcctcattttccccaacaccaaccagcctcctttgcacccaatccccatcccataccataccattcctcatcccatcctttccatatcccggcccctttgtgcgttgtcgcttcaacgcccacgccttcgtgccaagccatccaatcccgtcccgtccccataccatccatattccctaccaatgactttgccagctttggcggagcgcaaacattttttaattacgcaaatgttgggctgcccagctcgttttacccgccgggcatcgtagttattgaagcgatggcggcctttaagcgaggcttaaatttacacatccattattttggtggaatgaggagcgccaacgtatgtttataaatatgaatgtggatggtggacacatggaatccgcggctcccttcgctcgaattgtgaaattctatttaaaaacccatacttttctatgcagtacgtgttcatatagtgcaattctgaattaattgctatacaaaaacatctgctgataagtaaactattgaatcttaaaaccaagaaaatattttcacatttattctaatttcaaaacattactggctcgaattctttctttgctaagttgattgtaaggtagtaaaattgtagtatctaatgcttgaaagtatattaagcttgaatacaagtacacaattaactcacggcaaattatatacatgtatgtttttgatactaacttacagcattgatgatattgaagacaattcgatccttcgcagaggtgtgcccgtggcgcattccatctacggcgtggccagcaccataaatgcggccaactatgcactctttctggcgctggagaaggtgcagcagctggatcatccggaggtacgcaaatccacctctactatggagctcaaagtaatccgcgtttcttgcaggctaccaaggtgtacaccgaacaattgctggagctgcaccgtggacagggcatggagatatattggcgcgacagcttcacgtgtccctccgagtcggattacaagctgatgactgtgcgcaaaactggcggcctctttatgctggccattcgcctgatgcagctgttcagctccaacaaggaagactattcgaagttgacggctatattgggcctgtactttcagatacgcgacgactattgcaatctgagtctgaaagaggtgagtgtatagattggttggcaatatgcataagtcattgttaatctgtgataacattccgatgtagtacacggagaacaagagcttcgccgaggacttgacggagggcaagttcggcttcccggtaatccatgcggttcgcacccaaaagcaggataaacaggttctacgtaagtccaacgtcttgacctcaaccaaaggcttttcactcattaagctgatggcttatggttatatccacagacatattacgccagcgcacgcacgacattgaggtcaagaagtactgcatcaccttgttggaaaagctgggcagctttcagtatacacgcaaggttctggagtcgctcgacgcagaggctcggtcggaggttagtacttgaagacaagcaatgggaagtggaagttgcttggaagtcttgatgttaaaagtagaaattcgcacacatcccatcgttgctacgtgttttgtgctaaactaaagtaatctctcaacccacacaggtggctcgtctgggtagcaatccgtacatggaccgcctgctcaacaagctgctgtcgtggaagacgagcgatagcgccagcatcacgcagtcgaaccagatcaatcacaacaatgtctcacgcagcagccccaaccagaacacgttcaattgcaattagcagccaaagaggcaaaagagggagcagttgtgaattgcgaacggcagagctttttttgccgccaatccgggacagcagcaggccagcagccagccgacgcctgcgtgcctcagtgcgcccctgttgcgtttcctgcagaagctgaagatattctgagatttatgttaccctttgccaaaccgaaaagcccacagagaacccctaccttactgtcaaccgaaaccagagcgatgagaacggaaataggaggaggataggatttggatttgatagtgaatcggatgaaatgggatggataacaaaaccaacagcagccttacagaaaattgttaagccaaaagtaaattgatataagccaagcttatcgttgagctagcaaagagccatattacagcttttcaaaaaatttgtttttttacttttacattttactttatacttttaatttagttttgcttcaaatttacttatttagttagctcgtttagtttccccagttttagtttcgcccaacgaatgggagaggggggggtggggatcaagcaaatctcgcagagcattactgaattatagaatatgcaattttttagctcttgtatttctaagtgtgtttcgtattcgtaactcaattctgcaagcaattttcaatttctaagtgtcattttatcaaatctaactcactcggaactcaatgtgcacttcctttatcgacgttgttccattttaattgttatacaaatgcgattcgtatacatacatacatatgtactattaacgacaaattgttaatgttttatgcagacactataaaatcaacacaaatgaacgcaactatatatattgaaataatgataatgatgcactgcacggcaggtttttgcacattgcaccacctaaaaaatatatacatatattatatataaaaatatatatatttttattgtagttatacacatgaaagaaacaaaaagaaataaacggcaagagaaaccggaaaaataacaagaaaattaaccagattgctgaagtggaaatggaaaactataaactatgcgaacattttacggtagaaacgacaactaatagccgagaatttacagtgcacgcccagatgcagctaaacgcaaacgcacctaacattttgcccatatactatatactactaatgaaaacattgaaatatatgtaaatgtatttaaataaatatttatgccaagttgtcaactatagtttaagtgtcgggggatcatttacaaatagtcgccatatcggcatgttaactgcttatccagaattatacattcatttagaaagaatacatttttaatatccatttcttaacctagtaaaaataggtttcctaactgttttaaatgtgtatttaaatagaaacgtagaaatacgttattgtatgcttggtatgtacataagttagtcataattacttatccattagcttttgttttcaggagactaagagtcctgctcaatcatatccatcagctgcagaaactcctgggaaagcgccatcgacctcgttttccccatcgccatactcctcataatcatcgtcgtcctgcatgaaaaccaaatttttgagtaatggaacaaatgccagctaaagtttttgcaactaacctcgaaaccaaagcagtttttggcactgatcttggagttggcgctcggttcgtgcttgaccaacacctcctcgtcgccattaaccagctctacgaccattacctcgccatcatccccttgccattccacggtgaagtccgagttgtccggctcctccttgatgtggaacgtcttggtgccccgttgacttcggaggcgttgattgatgatcatcggctgcttttcggaggcggcaagcctggcctgtttgttgataatgataggtgctggcttgattctctgacggatcggatcactgactatggtttccacatcatcatcggcgtcttcagcctccgagttctccggctcgatttcagccaagtcatagctctctgggttgtcatcctcttcgttttcctcctggtcccggtccatatccacatactgatccttgatcaacgtgatgacagtgccatctttctgcagccgcacattgcggcccaatttaaggcgacgccgcttttcgcgagcattcgccgaatcatcgtgagtctccatgtgtctcattagattacccttgtgggtaaactcccgcggacaactcggacacttgtgcagtttctcgcgcggttctggtggctgatactcttcgttgtgcacgagattcatatggcggcgcagcaattgacgctgccggaaggcctgcgggcactgatcgcaatggaacggcttttcgtccaggtggatgagcatgtgtgaggccaaatggcgttgggtgaccgaagcgtagctgcacagcttgcagctgtaacacttttcgccctcgtgtgacttaacgtgcagcttgtattgatagcgatcgggcagctgctggccacagcgccggcatgtgattggcacatcagaggtgtgcatgtgtttaatgtgaacgcgcaggtcagccttccgaccgcaagttgtcgggcagtagttgcactgaaagacgggcttgtcgaccacgctgtggatgagcttgtgggcctctagtgagttagattgcgtaaatcgcgactagcagatgtcgcattggtacttcttctcgccggtgtggataaccatgtgtcgctttcagcttgaacatgtcctgcgatgcgtaggtgcagtgcggacattgatatggtctcttcgtcctgtctggcaggtcatgtggcggcgcagtttggtcatttccacgctggcgtatgtgcactccgtgcacttgtgcggtttttccttagtgtgcttgtagcgagtgtgacggaccagctcgccgctggtggtgaaggcgctttcgcagagcttgcacttgtgcggcttattgcccatgtgcgtgtttatgtggttttgcaggcccacgttcgatcgaaaggacctctcgcagatggagcacttgaaggatggctcgacgtcatgacttcgtgagtggcgcgtgatcagaaacttcttgctcgccgtatacgggcagtgtgggcatgagtacttatgtcccgatgcattcgaattctggctggtagaagaagctgtcttcagcttcacctccttgttgcttagcacaaagtctacgtccttcttgtcggcattctcatcctctgtcgtcgcattgtcctcaaattcgtagacctcagcctcgtttggcgtcagcgtagctgttgctgcctttacggcagcttcgtctacggtatagtccgacaattctgtcaccattgaactgatgtcgggctcatctaccagctcctcga

SEQ ID NO: 3 - DNA, 2534 bp, Human
agtgtgaccgggatggcgcattttcttgcaccaactaatgcggtgtcgctggcggctgaggagggcggagagttctgtggtgaaatagtgggaaggattcatgtaggcatcgggaagagcctaagtccacattataaaataggaagttgatgcggggtacagttactcccggaccggcggcgtgaaagtcgtgatatcatcgttgaactattagctttgaagtttaaatccaatggagaagactcaagaaacagtccaaagaattcttctagaaccctataaatacttacttcagttaccaggtaaacaagtgagaaccaaactttcacaggcatttaatcattggctgaaagttccagaggacaagctacagattattattgaagtgacagaaatgttgcataatgccagtttactcatcgatgatattgaagacaactcaaaactccgacgtggctttccagtggcccacagcatctatggaatcccatctgtcatcaattctgccaattacgtgtatttccttggcttggagaaagtcttaacccttgatcacccagatgcagtgaagctttttacccgccagcttttggaactccatcagggacaaggcctagatatttactggagggataattacacttgtcccactgaagaagaatataaagctatggtgctgcagaaaacaggtggactgtttggattagcagtaggtctcatgcagttgttctctgattacaaagaagatttaaaaccgctacttaatacacttgggctctttttccaaattagggatgattatgctaatctacactccaaagaatatagtgaaaacaaaagtttttgtgaagatctgacagagggaaagttctcatttcctactattcatgctatttggtcaaggcctgaaagcacccaggtgcagaatatcttgcgccagagaacagaaaacatagatataaaaaaatactgtgtacattatcttgaggatgtaggttcttttgaatacactcgtaatacccttaaagagcttgaagctaaagcctataaacagattgatgcacgtggtgggaaccctgagctagtagccttagtaaaacacttaagtaagatgttcaaagaagaaaatgaataatgttaagccattcttgattggacctcatagcttattttagttaatcttttttttgtcttttagccttaccaccttttaaaaaatttgttattctccagaaacagtaaataggtgagtaggggtggtgcaagtgaattcgttttcatttagaagcccctctgtacagataatcaaaattcaaagttgaaagaatcaaaagcagccacagttatgtaggtctgatttgaatgtcataattgcagtgacaggacattgccaccaactctatcctactaccatcaatgttgtgtttattccgtcaataaaaaagacttgcttccaggaatttttatccatacactttctaactgtactatctgggcagttccaagccagtttctattagctagctggaccaaagaccacaaatctctttttttcctaaacgctgctgtaaggaatatctcacttttccccccggaaacaccctcactgaagtcttctatgaaaaggctgataatgggctgggcgcggtggctcacgcctgtaatcccagcactttgggaggccgaggcgggcagatcacgaggtcaggagatcgagaccatcctgacacggtgaaaccctgtctctactaaaaatacaaaaaattagctgggcgtggtggtgggcgcctgtagtcccagctactcgggaggctgaggcaggagaatggtgtgaacccaggaggcggagcttgcagtgagccgagatagtgcctctgcactccagcctgggtgacagagcaagactccgtctcaaaaaaaaaagggctgataatgataaacagtgagcactccggtcctttttcttacgttttccttttttccttcctctccaccccacaagttttgctttttaaccaaggtgtctctgcttgatgaaattcacatgctagtctaaatctttttttctcccttgtaacatttatgtgccccaaactggttagtatatgggtacagcattccctttccaattgggaagcggaaaaagagagtatgggatattttagaagggagcctttgaaccttattatatttccccatcattgatagtgacaatcttaaaagggttgttttcttaccttaagtacaaaagcatggaaaaatgcgcttttccttcccgcccacatcaccaccccgacttgaagacagtaggtgcttgaatggaaagtgagtaggcatctttaaccgccctgattaaaggaaagtgttagcctgagagggcctgactgaaaagtaaccaaaggcttaatatcaaacactaattagctttttagtgccttaaccctgacctggttaccagttttctgtagtttctacacccaagccactgaagtcatctgtggcccaagaggtaggacaaaaaaaaaaaaaaaaaa

SEQ ID NO: 4 - DNA, 3250 bp, Arabidopsis thaliana
aagctttctaactaaccacttcatcaagactgaacaatgattctgtcattcgaaggggccaattttggtaagtatttcatatactcgaggtccagatttcactcttggtatatatagtgactaaactggaccttaccacagctagtttggacttttgactaatcagactttaaacttaatgcaatgtagaaaaagtgatgtgacaatatgtttcaactttgctaccaaaatttgcagaaatagttgctaaaacgtctccacttacatacctaccaaaatttcagacatagcacaatgatgctatagagaaacagaaggtggtcatgataggaggctttttatgtgtgtttttcactcagaacttaattcaaaaacactctgactcagttatctttaccacaagaagttaaccttcctctgtttttacaatcttacacagtagagtttgtcatgatcttaaaacgcctcaatgtattggtgtttacgcaaaacataaagtcaaaatttgtatctttctttaattcttctgagattttatgcatatatttcattaaatctgtcttgaggaccaagtatggaacttaaaatggtttaacaagcatatttccttgttttattttgtattagaggctaatgaagaaactttacattattctggtgttactattagatataaacacaactcaataaagtttacatgctctgtaagattattatcatgcggccgtgttacagcctggttctgtctgcaatgcggctgatacgaccgtccaaccgccgtctaagttcgatcgcaagctccgactctgagttcatttcatacatgaacaataaggctaagtccatcaacaaagcactagacaattcaattccactttgcaacaattctgttcctctttgggagccagtactcgaggttcacaaagctatgaggtacacgcttctctcaggcggcaaacgagtaaggccaatgctctgtttggtcgcttgcgagctcgtaggtggccaagagtcaaccgcaatgcctgcagcctgtgcggttgagatgattcacgcagcgtcgctcatcctagacgaccttccttgtatggatgacgacagcctccgccgtggaatacccaccaaccataaagtttttggcgagaaaacatccatcttggcctctaatgcgctcatgtctttggccgtcaagcagacattggcatcgacctcattgggggtgacttcagagagggttcttcgggctgttcaggagatggcgagagctgttgggacagagggacttgtggcaggccaagcagcggatttggccggagaaaggatgagttttaagaacgaagacgacgaattgagatatcttgagttgatgcatgttcataaaaccgcggttttggttgaagctgcggctgttgtgggagctataatgggaggtgggtctgatgaagagattgagaggcttaagagctacgcgaggtgcgttggactgatgtttcaggtgatggatgatgtactcgatgagaccaagtcttccgaggagcttgggaaaactgccggtaaagatttgatcaccggaaagctgacgtatccgaaggtgatgggtgtggacaatgcgagagaatatgcaaagaggttgaacagagaagcgcaggaacatcttcaggggtttgattctgacaaggtggttcctttgttgtctctcgctgattatattgtcaagagacaaaactgactgttgcaccatagcttaataatcaatgaaaagcatcaaagatgcaaagcgagaaagttatttgtttgtttttccttttaaacgaggaaaaaaggggtttgttaaacatgtttcgatttagctaaccaaaatttgcataaatattacaatggtcctgtatggaagagagttttggaccttttggtccataatcttaaaaatacaacgatatgttttgtgttgtaaactcaaaacttgaagttaaaaactctcacacaattatcatccccacaagaagttaaccatcgcaagctctgattagactcacacttctcggttggtctccaagctaaccggttcacagccgagacatgacacatgaacggttcgagccgaagagcaagagctgctgttgcagtcgtaccttcctctgtttctataatctttacgttccacagctctattagcccgctttccatccccactgccacgcacccactcttctcgttgcggtctagtccagtccaagccacggccgttacactgcttccaaacggaggcaagacaagaatctgtttaatgcgagcgtcgttctcaactgaccagatcttgacagtcttgtcccttgatgaagttgcaaattggtggccaaacgggttccatgaacatgcccatatgatcctcttgtgtgcttcaacctttgccatgagtttgtgactaacctcaccattgtctgaacagaagcaaaaaaacagacgagttagagacgctaaaaacgtagacatttttcgatgttttgagaaaatctgatttagaacggtgaagttgaaaccgcttgagttacctgtcctttggatagagaaaacggagaagtgacgatctcttgagacagacaagagcagagtgtcatcataagagaactccaagtgcgtcaccgtcaagctgtgagattgcaaacgaccaacagctttccatgtcccaacctcccatagccatatctctgccatggatgcagattgagcctgaagaagtttgtggttcatatataaaataataatttagtaatggaatcctgctcagttagatctaaaatataaatctaggagattgaagaagtgtaaaaaaattctgaaaactgcattaacttaccttacacgatgaagcaacaaggtttcccttgtggtcagagcagagagaaaatagttcattaccatgaccatagagtttatgagattccggccataaagtatgaaacgcaagctgatcttcgattggaggctctttcaactctgctggagccgcctctggaactgtctcaaatgtatccaaaccttcgcctccgccatttctctccagtggttcactagaagctgcgaaaagaaattaagaatctcaagattgcttttggtaaaaagctagtaatggtgttaaatcaatcaaaatcacttacagtgtaagtagataggtttctgtgatagtccaagagcagacatattcgctccaagaacctgcacgtctgcttgtaaatcctcagggaagctt

SEQ ID NO: 5 - DNA, 1843 bp, Mucor circinelloides f. lusitanicus
tctagatcctcatcaatgcggtgaggatcttttattttttgcatcaagatgtttgtgttttcaagcaagatagatacctactgtaattacaagctgagcatgccgcagatcaaatgacagaaaaaaaggtgaaaccagggcaacaaaccagcacatgttgaattgccgcccgacgcatatatcaaagctggaaaaagcttggaaactttacctttttctctcttctttttcatatttatttgtcaaataccatgctcaactcacacaacagaaccgaagaaagatcgaccgaagacgtaagagtgtatttctcggagggctaatctctgatgacatgcttgctaactggtagaaacagatcattttggagccttacacctacttgatatcacagcctggcaaagatatccgggcaaagttaatttcggcattcgacctgtggctgcatgtgcccaaggacgtgctgtgcgtaatcaacaagattatcggcatgttgcataatgctagtttaatgtaagtagtgcttgttatctcgccatgagggggaggaaaatggatacaattgctgatatcgatcccaatacaggatcgacgatgtgcaggatgactctgatcttcgaagaggtgtgcctgtcgctcaccatatttatggtgtacctcagactatcaacactgcaaattatgtcatcttcttggcattgcaagaagtgatgaagctgaacatccccagcatgatgcaagtgtgcacggaagagctgatcaatctgcatcgaggccagggcatcgagctgtactggagagacagcctgacttgccccaccgaagaagagtacattgatatggtcaacaacagtaagtgggcggtgtagagatcgtgcattgactcatgagtaacacgatcgggcagaaaccagcggtttattacgattggcggtgcgattaatgcaagcagcaagtgaaagtgacatgtgagtagatggtgccacgtacacacacctattctggctgatactgaactgtggggagcagtgattacacaccgctcgtcaacattataggcatccatttccaggtgcgcgatgactacatgaacttgcaatccaccagcgtatgtatcaaactcaaagggcgaagaaggagaagcatgcttacatgtgccttgatatagtatacaaacaacaagggcttttgtgaggatctgacagagggcaagttttcatttcccatcattcatgccatcagaaaggacccttccaaccgccaactgctcaacatcatcagccagaagcccacatccattgaagtcaaaaagtatgcattggaggtgattcgcaaggcaggcagttttgaatacgtgcgcgagtttctgcgtcaaaaagaggccgagtctttgaaggaaatcaagcgtttgggtggtaatcctttgctggaaaagtacattgagaccatcagagtagaggccaccaacgactagtagattgtcttttggataccctgtcaataaacacaccttttctttacccgtcattttcgaaatgctgtactcgcatgattgcattccatcaactaaaaccatagatgcaatacaaatacccccatgatagctatagtattagaaactcttgttgagagaaaaggtgatgcaaagagtactactatcatcctactgataaacctgacttgaagcgtttacctttataaataaaggcaccgtcctcttgtcaagtcccaggcacacgtttttaaaacatgtttatgtcaacgtgctattcaatggtgccaaaatatgataaacaaagttgatattgacatacttgtttaagggaactggagcaaagaattc

SEQ ID NO: 6 - DNA, 1057 bp, Scoparia dulcis
atgagccttgtaaaccccgtctccacatggccaaaccccacccggagctccgtattccgacccaaacccgccatcctcaacacgacccacttacccatctccttcctattcgccggaaaacccatctccgccgtcctcaccaaagagtacagccaccaaacctcctccaccttcgacttcaagaagtacatgctcgagaaagcctcctccgtcaacaaagccttagaatccgcagtctccctcaaagaacccctcaagatccacgaatctatgcgctactctcttctcgcggggggcaaaagggtccgccccatgctctgcctcgccgcctgcgagctcgtcggcggccacccctccaccgccatgcctgccgcctgctccatcgagatgatccacaccatgtccctcatgcacgacgacctcccctgcatggacaacgaccatctccgccgcggccatcccactaaccacatcgtcttcggagaggacgtcgctgtcctcgccggcgacgctcttcttgcctattccttcgaatacttagccaccgcgacagagggagtccttcctgaacggatagtcagagtgatcgccgagttggcgaaatgtatccgctcagaaggccttctggcggggcaggtggtggatatatgctctgaaggcgtgagcgagatcgggttggagcatttggagtacatacatttgcacaagacggcggcgttgctcgagggctcggtcgtcttgggcgcgattttgggtggcgggaatgatgaagaggttgaaaggttgaggaagtttgccaggtgtattgggctgttgtttcaggtggtggatgatattcttgatgttactaaaacgtcggtggagctggggaagacggccgggaaagatttggtggcggataagaccacgtatccgaagctgattgggattgagaagtcgagggagtttgcggagaagttgaaccgggaggcgcaggaacagcttgtagggtttgattcggataaggccgcgccgttgattgcgctcgcgaattatattgcgtatagggagaattgag

SEQ ID NO: 7 - DNA, 1107 bp, Croton sublyratus
atgagttctgtgaatttaggttcatgggttcatacttcctctgttataagtcaagctaccagatccagatccaaatccaaacccttatcgttttctcctgtttcgattcctctgttttaccgaaactcaaaacgcagcgtttcgtatgtttcagcgatcgtgactaaggatgaggagacgattcaggaagaacagaataagaattcaagttcttctcttggttttgatttcaaatcttacatggttcaaaaggctagtgctattaatcaagctttggaagctgctgtttcgcttcgcgagcctcttaaaattcatgaatctatgcggtactcacttttggccggcggtaagcgagtccggccggctttatgtcttgctgcgtgtgaacttgttggcggagatgaatctatggcgatgcctgctgcttgtgctgttgaaatgatacatactatgtcgcttatacatgacgacctgccgtgcatggataacgacgatctccgtcgtggtaagccgacgaatcatattgtgtttggtgaaaatgtggcggttcttgcaggtgatgcgcttcttgcttttgcttttgaacatattgctgtttctactttaaatgtttctcctgtcagaattgttcggggggtaggtgaattggctaaggcgattggtgctgaaggattggttgctggacaggttgttgatatctgttctgaaggtttatctgaagtagatttagaaaagcttgaatttattcatattcataagacagcaaaattgctggaaggagcggtggtgttaggggcaattatgggcggaggaaccgatgaagaggtggaaaaattgaggaaatatgcaagggatattgggttgttgtttcaggtagtggatgatattcttgatgtgaccaaatcgtctcaagaattggggaaaactgcaggaaaggatttggtggcggataaggttacttatcctaagttaatggggattgagaaatcaagggaatttgctgagaagttgaataaagaagctcaggagcaattggctggtttcgatcctgagaaggcggctccattgattgctttagctaattacattgcatacaggcaaaactaa

SEQ ID NO: 8 - DNA, 566 bp, Glycine max
acgagcaaattgaattcctagctagtacttaacataatgcagtgagattcacactcccaacgcttcctctttctcccttaaatatcttcattcatctcaacaccaccaccacttccccacttttgttactcagtatgcttggagcccttctcctcaacgccaacttcaagattcatttctcactcatatcatgccaagcccgtgtccccttacccgtcaagcccgcaccgctcagaatgccctctccccactacccccactgggcctccttgcaggccgacattgaagcccacctcaaacaaaccattcccctcaaagaacccctcgaggtcttcgagcccatgctccacctcgccttctccgccccccggaccaccgtcccggccctatgcctcgccgcctgcgagcttgtcggcggtcaccgccaacaagccatggccgcggcatcggccttgttactcaacctcgccaatgcacacgcccatgaacacctaaccgacgggcccatgtacggccccaacatagaactcctcaccggggacggggattgtccgttcgggtttgag

SEQ ID NO: 9 - DNA, 409 bp, Lycopersicon esculentum
gatcaattatggttttctccatggtgatgagcttttcacctagtttatgtcttccaaggagccgcatggttatgcagaaagcaatccaatgctcttcttctgtttcgacagcatctgagtccgtcaagtttgatcttaagacttattggacaactctaattagtgatatcaaccagaaacttgatgaggcagttccagtcaagtacccaaatcagatttatgaggccatgcgctactctgtcctggccaagggtgccaaaaggtccccacccatcatgtgtgtcgcagcttgtgagcttttcggaggaaatcgccttgctgcctttcccactgcctgtgccttagagatgggtcatgctgcttcattgattcatgatgatttgccctgcatggatgatgacacaactcg

SEQ ID NO: 10 - DNA, 318 bp, Glycine max
  misc_feature (1)..(318): n equals unknown
cactttcttaatccctaacccattgtcatgagtgccctcaatttgaacgcatggccacgccccagatccagatccagatcccgatccccaacctttcacgccgtcaataagttacccttcttcaccgttaccaaacggagagcattctcgctctctgcggtgctcacggtcgagacggaagagaagccaccaatcttcgacttcangaactacatgctttcannagcgtccgcggtcaacaaggccctcgacacntncgtttcgctccgcgagcctaagaagatcacgaggcgattgcggtactcgctcctcgcggcg

SEQ ID NO: 11 - DNA, 1889 bp, Taxus canadensis
ggaagagcggcaatcattctgtcatttaaaggttttctgcaccgaaatcctttaattttaaggttttctggaaggtgtgtgtgaaaatttgaagaaaattaacaagactgtaagtgtttttatatatttatgagctttggtttacttgggtgttactgaattggaacatacgtgcatgtcggagcaaagcagcatatttgaaatttgtgggtgttctttgaggtgtgttgcggatatagatttgattgttcagagttagtgtattttttttttttgttggttagattaattgggcaagttatagagaatggcttacacggcaatggcagcagggacccaaagcttgcaactccgcactgttgcttcctatcaagaatgcaatagtatgaggagttgttttaaattgacaccttttaaaagttttcatggagtgaatttcaatgttccctcactgggtgctgctaattgtgagattatgggtcacctgaaacttgggtcattgccatataaacaatgttcggtgtcatctaaatccacaaaaacaatggcccagttggttgatttggctgaaacagagaaggcggagggaaaggatattgaatttgatttcaacgagtatatgaagtccaaggctgtggcagtggatgcggcactggataaggcaatcccacttgaatatcctgaaaaaatacatgaatcaatgaggtattcacttctagcaggaggtaagcgcgtcaggcctgctctgtgcattgcagcatgtgagcttgtaggagggagtcaggaccttgccatgccaactgcctgtgcaatggagatgattcataccatgtctctgattcatgatgacttgccgtgcatggataatgatgatttcagaagagggaagccaacaaatcacaaggtctttggagaggacactgctgttcttgcaggggacgccctgctttcatttgcatttgagcatattgctgtggctacaagcaagactgtgcctagtgataggactttaagggtgatatctgaattgggtaagacaataggctctcaagggcttgtaggggggcaggtggttgatattacatccgagggggatgctaatgtggacctgaaaaccctggaatggattcatatacacaagactgctgtgctcttggaatgttcagttgtgagtggagggatccttggtggtgctacagaggacgagattgcgagaattcggcggtacgcccggtgtgtggggcttctgtttcaggttgtggatgacatacttgatgtcactaaatcttctgaagaattgggaaagactgcaggaaaggatttgcttactgataaggctacttatcccaagttgatgggcctggagaaagcaaaagaatttgccgctgaattggcgacgagagccaaggaagagctgtcatcctttgatcagataaaggctgcacctttgttgggtcttgcagattacattgcattcaggcaaaactgagaacaaagctgtaaagctattcttacatatcatctgtttttttttgacatctgctgaaaattagcaaataactttttcaagtttgtatctcccctgaatcataacgattcaggacatgaggtttctggtaccattgaaaagggggcgctcattgtagttgttttttagctaattccaacctgttttctatgtttccactttggatcaatttgatgtagattatgtttgtaggggtgacattgttagacttgttacatgtcatcaaattgttttttgcggccttaacatggttttaacttttcactagcaataaggtggcctaaagtgtttatgtaatttttcaatatagatagatatcttttaacaaaaaaaaaaaaaaaaaaaaaaaaaaaaaaaaaaa

SEQ ID NO: 12 - DNA, 1283 bp, Helianthus annuus
atttcttcttgttacaacaacaatcaaatcaaatccacttgtccaaccatgagacccatgagtttggttcattcatgttccatcttcaccggatcttcattcatcaaaacaacccccattaacaacaaacccactttcaagattcaccaaagacccacaattagatccacaatttctgcagcaattgttgaagaagaagtagttgagttgcaacaaaaacccaaacccactttcaatttcaacgcttacatgttgggaaagggtaattctgtccataaagctcttgatgaatcaattatgattaaaaacccaccaacaatacatgaagctatgaggtactctttacttgctggtgggaagcgcgtcaggcccattctctgtattgccgcgtgtgagctcgtcggaggggaggaggccaccgccatgccggcggcctgtgcggtggagatgatacacaccatgtctttgatacatgatgatcttccttgtatggataatgatgatttccgtagagggaagcccactaatcataaggtttatggggaagacgttgccgttttggcaggcgattcgctgctggcgtttgctttcgagtatgtttctagtaggacggaaggcgcatcgcctgcacgcgtcttggctgccatcggggagctcgccaagtcgattgggaccgaagggctggtggcagggcaagtggtggatattgcttcaaccgggggccaagatatcggattggatcagctagagtttatacacatacataaaaccgcagcattgttggaggcttctgttgtgttgggagctatcttgggtggtgggagtgatgcgcaggtggagaagctgaggacattcgcgcggtgcatcgggttgttgtttcaggtggtggatgatatacttgatgtgaccaagtcgtccgaggaattggggaaaaccgcagggaaagatttgttggtggataagacgacatatccgaaactgcttgggttggacaagtcgaggcagtttgcggaggagttgctggcggaggctaaacagcagctggaggagtttgaatcgcaggcggcggtggcgccgttgttggctctggcggagtatatagcttaccgccagaactaatgttgttgtattgtaacctaggttgctgttgtcatcaatttgattcatacctgtttgatgatgtaagattaattgacttgaagaaacaggaggcaaattagatttttcttttgattgcaatataccacctatattatcattctgaaaaaaaaaaaaaaaaaaaa

SEQ ID NO: 13 - DNA, 1394 bp, Sinapis alba
ccaactttaaattgattttgactccaattttctctgagtcctataaaaaaatcatttcatttttgttcttttaattgtaatctgaaattgcagattgttgttgaatggcttcttcagtgactcctctaggttcatgggttcttcttcaccatcatccttcaactatcttaacccaatccagatccagatctcctccttctctcatcacccttaaacccatctccctcactccaaaacgcaccgtttcgtcttcttcctcctcttccctcatcaccaaagaagacaacaacctcaaatcctcttcctcttccttcgatttcatgtcttacatcatccgcaaagccgactccgtcaacaaagccttagactccgccgtccctctccgggagccactcaagatccacgaagcgatgcgttactctctcctcgccggaggaaaacgcgtcagaccagttctctgcatcgccgcgtgcgagctagtcggaggagaagagtctttagctatgccggcgcgttgcgccgtggaaatgatccacaccatgtcgttgatccacgacgacttgccttgtatggataacgacgatctccgccgcggaaagcccacgaatcacaaagtttacggcgaagacgtggcggttttagccggagacgcgcttctttcgttcgccttcgagcatttagcgtcggctacgagctcggaggtttctccggcgagagtggttagagctgtgggagagttggctaaagccatcggcaccgaagggctcgtggcgggacaagtggtggatataagcagtgaagggttggacttaaacaacgtcggattggagcatttgaagtttatacatttgcataaaacggcggcgttgcttgaagcttcagcggttttgggtgggatcatcggtggagggagtgatgaagagatcgagaggctgaggaagttcgcgaggtgtattgggttgttgtttcaggtggttgatgatatcttggacgtgacgaaatcgtctcaagaactggggaaaaccgctgggaaagatttgattgctgataagttgacttatccgaagctcatgggtttggagaaatcgagagagttcgctgagaagttgaatacagaggcacgtgatcagcttttagggtttgattccgacaaggttgctcctttgttggctttggctaattacattgccaatagacagaactgatgttctgtgtgtgtgttttttagttcttgtcggaattctctctgatcttgttttcatatcgaattgtagaattattggagagaagctaaaacagattctagtgtttgtaatggctatctcatgtgttggtatgattgctatgttatagattttaatgttaagagagatcagtgattctagtaaaaaaaa

SEQ ID NO: 14 - DNA, 1271 bp, Catharanthus roseus
gaattcaattacaacatgggttccagcccaatcaatttattgtttggagaatggcagatccagttctatgcgctctaatctttgtcaccctctcaaaaatcaacttcccatttctttttttctttcgggcacaatccgaaagcccattttcagttgttctcgtctctcaatttctgccattataacgaaagaacaaacccaagaagagagcgaaagcaaaagcaagaaagaggtagccttttcttcctcatcttcatttgatttcaaggcatatatgattggaaaggccaattctgttaataaggcattggaagatgcagtcttggttagggaacctttgaaaattcatgaatctatgaggtactcacttctagctggtggtaaaagagttcgtcctatgctctgtattgctgcttgtgaactttttggtggaacagaatctgttgccatgccttctgcttgtgctgttgagatgattcatactatgtctctgatgcacgatgaccttccctgtatggataatgatgatttgagaagagggaagccgacaaatcataaggtttttggggaggatgttgctgttttagctggggatgcccttcttgcatttgcctttgaacatatagcaactgctaccaaaggtgtctcttccgaaagaattgtgagagtagttggggaattggctaagtgtattggttcagaagggctggtggctggacaggttgttgatgtgtgctctgagggcattgctgatgtagggcttgagcatttagagttcatccatattcacaagactgcagctttattagaagggtctgtggttttaggggcaattgtgggtggtgctaatgatgaacaaatttccaaattgaggaaatttgctaggtgtattgggttgttgtttcaggttgtagatgatattcttgatgttactaaatcttctcaagaattaggaaaaactgcagggaaagacttggtggcagataaggtcacttatcctaaacttcttggtattgataagtccagagaatttgctgagaagttgaatagagaagctcaagaacaacttgctgagtttgatcctgaaaaggctgctccattaattgctctagcaaattacatagcctacagagataactaataatatgttgtttaagttataagagaatttcacatttaagatagactataccaatagaattagatattgttgtcacacaagatatgagctggtaattctttcacattgttaatggaaatgatccgaattc

SEQ ID NO: 15 - DNA, 1428 bp, Capsicum annuum
agagaataggaaacaatatcatgacagtccaacatctcgactccatataaaatagtccactcaacactactttatatacatcttcccatattctaatatttttaagcttactttctccaagtgaaattgcaccacaaatctcaaaaaaatgagatctatgaaccttgttgatttatgggctcaacaagcttgtttagttttcaatcaaactttgtcttataaatccttcaatggattcatgaaaatccctttgaaaaattccaaaattaatcctaagttaaataagaaaagaccattttctcctctaacagtttcagcaattgctactaccaaagaagatgaaagaattgaagcagcacagacggaggaaccattcaatttcaagatttacgtaacggaaaaggctatttctgtaaacaaggcattagatgaggctattattgtaaaagaaccccatgttatccatgaagcaatgcgttattcccttctcgccggcggcaaacgggtccggccaatgctttgtctggccgcctgtgaactcgtcggcggcaaccaggaaaacgccatggccgccgcttgcgccgtcgagatgatccacactatgtcactcattcacgatgatttaccttgtatggacaacgacgacctccgccgcggaaaacctaccaaccacaaaatctacggcgaggacgtcgccgtcctcgcgggagactccctcctcgccttcgccttcgaacacattgtcaactccacggccggagtcaccccgtccagaatcgtaggcgctgttgcggagttagctaagtccatcggaaccgaaggactggtcgccggacaagtagcagacataaaatgcaccggcaacgctagcgtctctctagaaacgctggaattcatccacgtacacaaaacggcagctctcctagaatcctccgtcgtactcggcgcaatactcggcggcggcacgaatgtcgaggtggagaagctacggaggtttgccagatgcatcggattactatttcaagtagttgatgacatacttgacgtgacgaagtcgtcagaggagctcggaaaaactgctgggaaagatttggttgtcgataagacgacgtatccaaaattgttgggattagaaaaggctaaggaatttgcggcggagcttaatcgggaagcgaagcaacagctggaagggtttgattcgcgcaaagctgctccgttgattgcattggctgattatattgcttatcgtgataattaggaaatagtaatattatggaatgaatgtgctaattcttcatttgatttaccaaatggaaatgaaggtgatcgatctattaatgaatcaattgcttatcttgttgatacaaattggagtcttaaattcgtaattatatattacgactttcagtgtgcttatgttggtaatat

SEQ ID NO: 16 - DNA, 3900 bp, Streptomyces griseus
agatctcggaaaggcgtgagatgggccgccgccagcctacgaagcactcgttcagtgattctccgcgcccggcccacgacgtgcgcggaggccgccaccacaccccgtcgtccgaggacgcccgggtcgtggactcggacgtggtcggttcggtcctgcgcaccgcacgggccgtgctggcggaccggatcgacgaggcggtgcggagcgacgcctcgttctgcgaggagttggcacggcgggtcgccgacttcacgctggagggcggcaagcggatgcggccccgcctcctgtggtgggggatgcgttcctgtggtgcggcggagacggcggccgcgctgcggctcggggtggcgctggagctgatccagagctgcgcgctcatccatgacgatgtgatggaccgctcgcggcttcgccgggggaagcctgccatgcacatcggtctggcagaacgtgcgggtctctcgccggattccgagcggggttccgacttcggcgcctcggccgccgtgctggcgggggacctcgcactggtctgggccgacgacacggtggcggagaccgtgctgtccgccgcccagcgtcgtcggatcggcgccctgtggcgggccatgcggaccgagatggtcgccgggcagtatctggatctgcgtggccagctcagcggtgggtcgtccgtggcgcaagccttgcggaccgcctgcctcaagagtgcctcgtactccgtcgagcggcctctggcgatcggcgccgccctggcgggcgccgatgaccggaccaccgacgctctgcgctccgccggccggtgtgccggtatcgcctttcagctgcgggacgatctgctcggggtcttcggcgacccggcgctgaccgggaagccgtccggcgacgacatccgcgagggcaagtcgacctatttgctggctgtcgcccggaactcggccgaagcgtcgggcgacgaacaagcactggcggtactcggccgcgccaccggcaacgccgacctcaccgaggaggatctcgcggacgtacgcggcgtgctcgaggtgacgggggcgcgcgcccatgtggagcggaaggcggagcacctccgcgaccacgccgtacgtcgtctgggacaggccgtcgacgtggacgcgcacggcggccgccagttgctcggtctgctgcgcacggtctccggggagcggaccgcccactcccccaccaccgccggtgagacgcacggtggcggcaccggggtggcaggggcctcaccggtcctgatgacgaccgaaggaggtaatgcggggtgatcacggtcaaggggcccgtcgaccatgtggtggtggtcggtgccggtctggcaggactggccgccgcgctgcacctgctgggcgcgggccgccgcgtgacggtcgtcgagcgggaggacgtgcccgggggccgggccgggctcctggagtcgggcggcttccgtatcgacaccgggccgacggtactgacgatgccggatctggtggaggatgccttcgccgcggtcggggagcggatggccgaccggctggaactgatcaggctcgcccccgcctaccgggcgcggttcgccgacgggtcccagctcgacgtgcacaccgacggtgccgcgatggaggccgccgtcgaggagttcgcgggggcccggcaggcggtcggctaccggcggctgcggatctggctggagcgcctctaccgggtgcagatgcgccgtttcatcgacaccaacttcgactcaccgctccagctcgcccaccccgacctggcccgcctcgcggcgctcggcggtttcggccggctcgacgcgcggatcggacacttcgtctcggacgagcggctgcgcagggtcttctccttccaggcgctgtacgcgggcgtgcccccggcacgggcgctggccgcgtacgcggtgatcgcctacatggacacggtggccggtgtgtacttcccccggggcggcatgcacgctctgccccgggcgatggcggacgcggcctccgacgcgggagccgtgctccgctacgggcagagggtgacccggctggagcgttcgggtgaccgggtcaccgctgtcgtcaccgaccaggagcacattccgtgcgacgcggtcgtcctgacccccgatctgcccgtcagctaccgcctgctcggccgcaccccgcaccgccccctgcctctgcggcactcgccgtccgcggtgatcctgcacacgggcacggatcgcacctggccggacctggcgcaccacaccatctccttcggcgcggcctggaagaacaccttccacgaactcacccgcaccggccggctgatgtcggacccctcgctcctcatcacccggcccaccgcgaccgacccctctctcgcaccgccgggcaagcacctccactacgtgctggctccctgcccgaacaccgaggtcgggcccggcgtacgggaatggcgggagctgggaccccgctaccgggacgagctgctggccgagctggagcgccgcgagatgcccggtctcggcgcggcgatcgaggaggaggggctggtcacgccggtcgactggaccgcacaggggcatgcggcgggcacccccttctccgtggcccacaccttcccccagaccggacccttccggccgcgcaacctggtgcggggcacggtcaacgccgtcctcgccggttgcggcaccacacccggtgtcggcgtgccgaccgtcctgatctccgggaagctggcggcggagaggatcaccggccctcgtatcgcccgagccccgcgctccgccccgggaggttccagcgcatgaccgtccacgaactcgatgcagcgggcatccacgatcccgcgctccgggccgcgtacacccgctgccggggtctcaacgcacgtcacggcaagacctacttcctcgcgacgcggctcctccccgtcgaccggcggccggccgtccacgccctgtacggcttcgcccgctgggccgacgacatcgtcgatgatctcgacaccccggccacgccgggggagcgcgcccgcgccctgctcggcctggaagcccagctggaggcagggttgcggggggcgcgggccgccgagccggtgatccgtgccctggccgacacggcggccaggtacaccatcgaccatcggcacttcaccgacttcctgtcctccatgcgcagcgacctgacggtcggcggctacgcctcgtacgaggaactcggccggtacatgcacggctcggccgcggtgatcggcctccagatgcttccggtgctcgggacggtggtggcgcgcgaggaagcggcaccgcacgcggccgcgctcggtgtcgccttccagctgaccaacttcctgcgggacgtgggtgaggacctggaccggggacggctctatctgccgaccgagctgctggccgcgcacggggcggaccgggaccgcttcgagtggagccggagcacggggatgccggacagccggatcaccgatgtcctgcgggccgccgcagcccacaaccgagccgtctaccgggctgccctgcccggcatcgcgatgctcgccccggtgtcgcggccctgcatccgtacggcgttcgtgctgtacagcggcatcctcgacgcgatcgaggcggacgggtacgcggtcctgcaccgccgggcggtcgtcccgcgccgacgacgggccgccgtggcgctggacggtctggtgcgggcggtcgccgtgcgcacggtgtgccggcgccgagcggacgcggtcgatgcgtcccggtccgccgagctgtcccggccgcggacggccggcggaccggccccggtgcggagggaggccgtatgaggccggcggcacgacgcccacgctccggccgtcttcccttgcgggtgcggcgcgcgc

SEQ ID NO: 17 - DNA, 1157 bp, Lupinus albus
cacaaaaccactagattcagatcttcaagttttcaaatcttccatagctttacaaagttacccatttcttttataagcatcgaaaaaccaaaaaggtcacaactttcatatttttcttctttctctatctctgcaatgctcactaaagaagataccgttaaagacaaagaagaagaagaagaagaagaagagaaacccagattcaatttcaacttgtacatggttgagaaatcacgttcagtgaaccaagctttaaacgacgccgtttcgttacgtgagccacataaaattcacgaagctatgcggtattctctactcgccggcgggaagcgcgtgaggccggtgttatgcattgcagcctgtgaagttgtcggcggcaatgaatctacggcgatggccgccgcatgttcaattgagatgatacacactatgtcccttattcatgatgatctcccctgcatggacaacgacgatcttcgccgagggaaacccacaaaccacaaggttttcggcgaaaatatcgctgtccttgcaggggatgcattattggcatttgcctttgagcatatcgccgtttcaacctccggtgtgtcaccggagagaattatcggcgcaatcggggagcttgcgaaatcgatcggaactgaaggccttgttgcaggacaagtagtggatattaattcagaagggttatgtgatattgggttagagaaattggaatttattcatcttcataaaacagcagcacttctagaaggttctgttgttgttggagcaattcttggtggtgggtgtaatgaagaggttgaaaagttaaggatgtttgctaggtacataggattgatgtttcaggttgttgatgatgttcttgatgttactaagtcttcaaaggaattgggaaaaactgcagggaaggatttggtggctgataaggttacttaccctaagcttttagggattgagaaatctaatgagtttgctcagaaattgaatagggatgcacaagaacagctttctggttttgatccagttaaggttgctcctttgattgcattagctaattacattgcttatagcccaaattaaactctcttgtgtaacaatttgttgtttagaaaaggttaaatttatggcaattattgagtttacttattacc

SEQ ID NO: 18 - DNA, 1109 bp, Arabidopsis thaliana
caaggatgagatcatcctcataggcgatgttgtttagtggttcagcgatcccattaagcagcttctgctctcttccggagaaaccccacactcttcctatgaaactctctcccgctgcaatccgatcttcatcctcatctgccccggggtcgttgaacttcgatctgaggacgtattggacgactctgatcaccgagatcaaccagaagctggatgaggccataccggtcaagcaccctgcggggatctacgaggctatgagatactctgtactgccacaagggcccaagcgtgcccctcctgtgatgtgtgtggcggcctgcgagctcttcggtggcgatcgcctcgccgctttccccaccgcctgtgccctagaaatggtgcacgcggcttcgttgatacacgacgacctcccctgtatggacgacgatcctgtgcgcagaggaaagccatctaaccacactgtctacggctctggcatggccattctcgccggtgacgccctcttcccactcgccttccagcacattgtctcccacacgcctcctgaccttgttccccgagccaccatcctcagactcatcactgagattgcccgcactgtcggctccactggtatggctgcaggccagtacgtcgaccttgaaggaggtccctttcctctttcctttgttcaggagaagaaattcggagccatgggtgaatgctctgccgtgtgcggtggcctattgggcggtgccactgaggatgagctccagagtctccgaaggtacgggagagccgtcgggatgctgtatcaggtggtcgatgacatcaccgaggacaagaagaagagctatgatggtggagcagagaagggaatgatggaaatggcggaagagctcaaggagaaggcgaagaaggagcttcaagtgtttgacaacaagtatggaggaggagacacacttgttcctctctacaccttcgttgactacgctgctcatcgacattttcttcttcccctctgattttgggccctcttttacatttgggccttccttcgctatacgaaattaggccctgtaatggactgtgtatcgttcatttttagcccagagcttcttcgcttg

SEQ ID NO: 19 - DNA, 12753 bp, Pantoea agglomerans
ggatccgcggctcgcggtagccgtgcatacgcagcaccggacagaacaccgcccactggaaccagcggatcagcagctcgtgaaatgctggatcgtggatgttgccgccctggaaaccgccgatatcggtagtccaccatggaatacccgccagtcccatgttaagcccggcagccagctgattgcggaacgaatggaaggaggagtgaacgtctccagaccatgcgagtacgccatagcgttggctgcctgcccagctacagcgcaccaggttgactatctcgttttcgccttctgcacgcaggccgtcgtaaaagccctgagcgaaatcgcgcggatagcggttgcctacttccagtactggtcccgcatggtagcgatagttatcgaagtcataggcacgatactccggctcggcttcatccagccagaagagcttgatcccgtaatcaaaatagtttttcttcaccgtatcccagacaaactgccgcgcctgcgggtgggtggcgtcaaagaaagtggtgttgcccataaaatcgaggttgacctgcacgccgcgatcgctggtcaccagccagcctttggctttcatctgcggaaagagcgggctacgcgcttccacggtcggccagaccgacaccatgagcctgatgcccatggattccagctcttctaccatcgcccgcggatccggccagtcgacaggatcgaaacaccaggttccctgattgggccaatggaagaaatcgataaccatcactgacagcggcaggttgcggcgatgatattcgcgcgcgacgtccaatacctcctgctgggtgcggtagcgcaatttacactgccacaggccgctgataaattccggcgcggcgggcggcgtaccggtggctttggcatactggcgggttatctccatcacgctatcacccgcagtgatccaatagtccatctcctgggtgacgcgtgaggtccactggctgtggtttttcgcaaagctagcttcgccaatggccgggttattccacaacaggccgtagccgaggctggactggacaaagggcacgctggcctgcgagttacgctgcgccagctccagagagcagcctttcagatccagccagggctgctggtactgccccatgccatacaacttttctccctggcgggcttcaaaacggactgtcagctgatatttaccgccgggcagcggtttaaattctcggccatccagcttcagtgcactgacgtacttgtcctggcttttttcgctggcgccgatgccaaccgtagaacgctgtcgccacatctcttccagcagcagctcgccgcgctgattgtaaaacgccagctggcccttaaggttcaataccgcgctgatgttgccgttgcgcagagtcagggtttctgcatctcgcaaaatttcagcctggcatgattctggcgtcagcagagcatgaagggcggaagtaaactccggcgcgcaggtggcgcgtacccgcaggctgttcttgccccagggctcgagacgtaaaatctgtcgttcgaagcgccattcgatggcgttagcgtgctcaattaattcgctcatggagaggtcatcctttcacaatggtttgcattttagccaaattgatttcctgcatggtctggtcatcaagcttgtaccagcgcagcgtggcgaaagccgccagagagagcagtccggggacgacggtgaaaagggcgacgatgcagtgcattgccagcgacgtctgttccggcgcgttggcgacgtagccgctgaagcccaacgtccaaccgacgatggcaccgctgagcgccatgcccagcttgaggacggcgaggaaggtggagaaaatgatgccatccatacgtttgccctggctccattcgccgtagtcggcgacgtcggccatcatcacccacatcagggtggtggtcgcctgatagagcgtcgagataataaacgttagcggaaccaggacgaaaacggatttcggtgcaaagaacagggcgatgctgagcacacccgccagtacggcacagtagccgaatatctgcactttattgaaattgcgggtcagacgcttggccagcagactaccggcggctttgccaaggatatgcgcggcgagcatccacatgaagtaactggcgctgccgaggtaataggtgacgaagtacatcatcgccccgaggtagctgccgataaagccaggcagggtagccagcatataggtcagcgtcagggttgagggcggcgcatgccagcgcaggagctggccgaggatcagggtttgggtcagtccattacccactgaagaaaaaatataggcgacgccaaacaggcatagccagcgatgctggcgtagcgcctgcaccagaaccatcaaaaggttattcattgttaacatactcaatcaaacagaagtcctcatgcagcaggtgccgcacgatcgtgaaagctgtcagagttgagatgtcgttacattggctggtccgggcgttgagagcgaaccgataacgtagcatctatttcggctctggaaaagagaggtacaagattgcttatgcatcgctgctaagcgcctggaagcattttacattcagtacatgctggcagcctatattactggacatggcttattagaatagttgattagctataagctacatttttttactaaccgttttaaaacgtagaataagatgaccattataagcgtaaagctccacggccaattaaaaaaccataagcataactatttgcagtctcattaaaagctaacgaaaacatgagcataacatttaacgctgctgataaaacgccaagtatcgctgatagagtgatacctgaccatagtaaaaaaagtattgctttcttcattgtctggatacttcttaatgtgaacaaagtgacaaagaaaccttaaacttttctcaccaataagtaaaataaaccattgttgcttagcggaattaatttataaggtaagtatatctaacaagcatagagcttcattgtcacatttaatgcggttttgcctgattctgataatcatacgcgaaagattgcttatgcctcgccgtgttttgtctacccttgcctataccgtaactcaaaaaaggggtattgcgcatggctttacgttcattaggcacgacgggattacacattccaccgctggtttttggcggtaacgtctttggctggaccgttgatgagcagcagagcttcagcctgctggatgcgctgctggagcgcggcctgaacgctatcgacaccgccgacgtctactctgcctgggcaccaggtaacaaaggtggcgaatccgaaacgatccttggcaagtggttcgctgcccaccctggcgcacgggaaaagatcaccctgtttaccaaagtaggctcagatctaaaggcacagcgtctcatgcttcgcacaatgtaaaactgcttcagaacctggcgagagctatccgcgcggtctacggttaactgatactaaaagacaattcagcgggtaaccttgcaatggtgagtggcagtaaagcgggcgtttcgcctcatcgcgaaatagaagtaatgagacaatccattgacgatcacctggctggcctgttacctgaaaccgacagccaggatatcgtcagccttgcgatgcgtgaaggcgtcatggcacccggtaaacggatccgtccgctgctgatgctgctggccgcccgcgacctccgctaccagggcagtatgcctacgctgctcgatctcgcctgcgccgttgaactgacccataccgcgtcgctgatgctcgacgacatgccctgcatggacaacgccgagctgcgccgcggtcagcccactacccacaaaaaatttggtgagagcgtggcgatccttgcctccgttgggctgctctctaaagcctttggtctgatcgccgccaccggcgatctgccgggggagaggcgtgcccaggcggtcaacgagctctctaccgccgtgggcgtgcagggcctggtactggggcagtttcgcgatcttaacgatgccgccctcgaccgtacccctgacgctatcctcagcaccaaccacctcaagaccggcattctgttcagcgcgatgctgcagatcgtcgccattgcttccgcctcgtcgccgagcacgcgagagacgctgcacgccttcgccctcgacttcggccaggcgtttcaactgctggacgatctgcgtgacgatcacccggaaaccggtaaagatcgcaataaggacgcgggaaaatcgacgctggtcaaccggctgggcgcagacgcggcccggcaaaagctgcgcgagcatattgattccgccgacaaacacctcacttttgcctgtccgcagggcggcgccatccgacagtttatgcatctgtggtttggccatcaccttgccgactggtcaccggtcatgaaaatcgcctgataccgcccttttgggttcaagcagtacataacgatggaaccacattacaggagtagtgatgaatgaaggacgagcgccttgttcagcgtaagaacgatcatctggatatcgttctcgacccccgtcgcgccgtaactcaggctagcgcaggttttgagcgctggcgctttacccactgcgccctgccagagctgaattttagcgacatcacgctggaaaccaccttcctgaatcggcagctacaggctccgctgctgatcagctccatgaccggcggcgttgagcgctcgcgccatatcaaccgccacctcgccgaggcggcgcaggtgctaaaaattgcgatgggggtgggctcccagcgcgtcgccattgagagcgacgcgggcttagggctggataaaaccctgcggcagctggctccggacgtgccgctgctggcgaacctcggcgcggcgcagctgaccggcagaaaaggtattgattacgcccgacgggccgtggagatgatcgaggcggatgcgctgattgtgcacctaaacccgctgcaggaggcgctacagcccggcggcgatcgcgactggcgcggacggctggcggctattgaaactctggtccgcgagctgcccgttccgctggtggtgaaagaggtgggagccggtatctcccgaaccgtggccgggcagctgatcgatgccggcgttaccgtgattgacgtcgcgggcgcgggcggcaccagctgggccgccgttgaaggcgagcgggcggccaccgagcagcagcgcagcgtggccaacgtctttgccgactgggggatccccaccgctgaggcgctggttgacattgccgaggcctggccgcagatgccccttattgcctcgggcgggattaaaaacggcgtcgacgcggcgaaagcgctgcggctcggcgcgtgcatggtagggcaggccgccgccgtgctcggcagcgcaggcgtctccacggagaaggtgatcgatcacttcaacgtgattattgagcagctgcgggtggcctgcttctgcaccggcagccgcagcctgagcgatctaaagcaggctgatatccgctatgtgcgggatacgccatgagccattttgccattgtggcaccgccgctctacagtcatgcggtggcgctgcatgccctggcgctggagatggcccaacgcggccaccgggtgacctttctcaccggcaacgtcgcctcgctggcagagcaggaaacggagcgggtggcgttctatccacttcccgccagcgtgcaacaggcccagcgcaacgtccagcagcagagtaacggcaacctgctgcggctgattgcggccatgtcatccctgaccgatgtgctctgccagcagttgcccgctattctacagcggctggcggtggacgcgctgattgtcgatgagatggagcccgccggaagcctggtcgccgaggcgctgggactaccatttatctctattgcctgcgcgctgccggtcaaccgcgagccgggtctgccgctgccggtgatgccgtttcactacgccgaggataagagagccctgcggcgttttcaggtcagcgaacggatctacgatgcgctgatgtacccgcacgggcagacgatcctgcgccacgcccagcgctttggtttgccggagcgcaggcgtctcgacgagtgtctctcgccgctggcgcagattagccagtccgttccggccctcgacttcccacgccgggcgctgccgaactgttttcactacgtgggagcactgcgctatcagccgccgccgcaggtagaacgctcgccacgcagcacgccgcggatctttgcctcgctgggcaccctccagggccaccgtctacgcctgtttcagaagatcgcccgcgcctgtgccagcgtgggggcggaggtgaccattgcccactgcgatggcctgacgcccgcccaggccgactcgctctacgcctgcggcgcgacggaggtggtcagctttgtcgaccagccgcgctacgttgccgaggctaatctggtgatcacccacggcggtctcaataccgtactggatgcgctggctgccgcgacgccggtgctggcggtgccactctctttcgaccagcccgccgtggctgcccggctggtctataacgggctgggtcgccgggtatcgcgctttgccagacagcagacgctggcggatgagattgcccaactgctgggggatgagacgctgcatcagcgtctggcgacggcccgccagcagcttaacgacgccgggggcacgccccgtgcggcgaccctgattgaacaggccatagcagggagtgagagcgtatcgtgagggatctgattttagtcggcggcggcctggccaacgggctgatcgcctggcgtctgcgccagcgctacccgcagcttaacctgctgctgatcgaggccggggagcagcccggcgggaaccatacctggtcattccatgaagacgatctgactcccgggcagcacgcctggctggccccgctggtggcccacgcctggccgggctatgaggtgcagtttcccgatcttcgccgtcgcctcgcgcgcggctactactccattacctcagagcgctttgccgaggccctgcatcaggcgctgggggagaacatctggctaaactgttcggtgagcgaggtgttacccaatagcgtgcgccttgccaacggtgaggcgctgcttgccggagcggtgattgacggacgcggcgtgaccgccagttcggcgatgcaaaccggctatcagctctttcttggtcagcagtggcggctgacacagccccacggcctgaccgtaccgatcctgatggatgccacggtggcgcagcagcagggctatcgctttgtctacacgctgccgctctccgccgacacgctgctgatcgaggatacgcgctacgccaatgtcccgcagcgtgatgataatgccctacgccagacggttaccgactatgctcacagcaaagggtggcagctggcccagcttgaacgcgaggagaccggctgtctgccgattaccctggcgggtgacatccaggctctgtgggccgatgcgccgggcgtgccgcgctcgggaatgcgggctgggctatttcaccctaccactggctattcgctgccgctggcggtggcccttgccgacgcgattgccgacagcccgcggctgggcagcgttccgctctatcagctcacccggcagtttgccgaacgccactggcgcaggcagggattcttccgcctgctgaaccggatgcttttcctggccgggcgcgaggagaaccgctggcgggtgatgcagcgcttttatgggctgccggagcccaccgtagagcgcttttacgccggtcggctctctctctttgataaggcccgcattttgacgggcaagccaccggttccgctgggcgaagcctggcgggcggcgctgaaccattttcctgacagacgagataaaggatgaaaaaaaccgttgtgattggcgcaggctttggtggcctggcgctggcgattcgcctgcaggcggcagggatcccaaccgtactgctggagcagcgggacaagcccggcggtcgggcctacgtctggcatgaccagggctttacctttgacgccgggccgacggtgatcaccgatcctaccgcgcttgaggcgctgttcaccctggccggcaggcgcatggaggattacgtcaggctgctgccggtaaaacccttctaccgactctgctgggagtccgggaagaccctcgactatgctaacgacagcgccgagcttgaggcgcagattacccagttcaacccccgcgacgtcgagggctaccggcgctttctggcttactcccaggcggtattccaggagggatatttgcgcctcggcagcgtgccgttcctctcttttcgcgacatgctgcgcgccgggccgcagctgcttaagctccaggcgtggcagagcgtctaccagtcggtttcgcgctttattgaggatgagcatctgcggcaggccttctcgttccactccctgctggtaggcggcaaccccttcaccacctcgtccatctacaccctgatccacgcccttgagcgggagtggggggtctggttccctgagggcggcaccggggcgctggtgaacggcatggtgaagctgtttaccgatctgggcggggagatcgaactcaacgcccgggtcgaagagctggtggtggccgataaccgcgtaagccaggtccggctggcggatggtcggatctttgacaccgacgccgtagcctcgaacgctgacgtggtgaacacctataaaaagctgctcggccaccatccggtggggcagaagcgggcggcagcgctggagcgcaagagcatgagcaactcgctgtttgtgctctacttcggcctgaaccagcctcattcccagctggcgcaccataccatctgttttggtccccgctaccgggagctgatcgacgagatctttaccggcagcgcgctggcggatgacttctcgctctacctgcactcgccctgcgtgaccgatccctcgctcgcgcctcccggctgcgccagcttctacgtgctggccccggtgccgcatcttggcaacgcgccgctggactgggcgcaggaggggccgaagctgcgcgaccgcatctttgactaccttgaagagcgctatatgcccggcctgcgtagccagctggtgacccagcggatctttaccccggcagacttccacgacacgctggatgcgcatctgggatcggccttctccatcgagccgctgctgacccaaagcgcctggttccgcccgcacaaccgcgacagcgacattgccaacctctacctggtgggcgcaggtactcaccctggggcgggcattcctggcgtagtggcctcggcgaaagccaccgccagcctgatgattgaggatctgcaatgagccaaccgccgctgcttgaccacgccacgcagaccatggccaacggctcgaaaagttttgccaccgctgcgaagctgttcgacccggccacccgccgtagcgtgctgatgctctacacctggtgccgccactgcgatgacgtcattgacgaccagacccacggcttcgccagcgaggccgcggcggaggaggaggccacccagcgcctggcccggctgcgcacgctgaccctggcggcgtttgaaggggccgagatgcaggatccggccttcgctgcctttcaggaggtggcgctgacccacggtattacgccccgcatggcgctcgatcacctcgacggctttgcgatggacgtggctcagacccgctatgtcacctttgaggatacgctgcgctactgctatcacgtggcgggcgtggtgggtctgatgatggccagggtgatgggcgtgcgggatgagcgggtgctggatcgcgcctgcgatctggggctggccttccagctgacgaatatcgcccgggatattattgacgatgcggctattgaccgctgctatctgcccgccgagtggctgcaggatgccgggctgaccccggagaactatgccgcgcgggagaatcgggccgcgctggcgcgggtggcggagcggcttattgatgccgcagagccgtactacatctcctcccaggccgggctacacgatctgccgccgcgctgcgcctgggcgatcgccaccgcccgcagcgtctaccgggagatcggtattaaggtaaaagcggcgggaggcagcgcctgggatcgccgccagcacaccagcaaaggtgaaaaaattgccatgctgatggcggcaccggggcaggttattcgggcgaagacgacgagggtgacgccgcgtccggccggtctttggcagcgtcccgtttaggcgggcggccatgacgttcacgcaggatcgcctgtaggtcggcaggcttgcgggcgtaaataaaaccgaaggagacgcagccctcccggccgcgcaccgcgtggtgcaggcggtgggcgacgtagagccgcttcaggtagccccggcgcgggatccagtggaagggccagcgctgatgcaccagaccgtcgtgcaccaggaagtagagcaggccatagaccgtcatgccgcagccaatccactgcaggggccaaacgcccgccgtgcccacggcaatcagcgcgatagccaccccggcaaacaccaccgcaaagagatcgtttagctcaaatacgcccttgcgcggggtatggtgtgactcatgccagcgccatccccagccgtgcataatgtagcggtgggtaaacgcggcgatgccctccatcgcaataacgctcaagatgacgattaaactatttactagcatagcggtgcgcgctcctgcgactcagactggcttaatcaaaacccttagcctctaagcatagtcgcaatcgcaggcggcgcgcatcggtatcaggccagagcctgctgcagatccgccagcagatccttctcatcctcaatgcccaccgacaggcggatcagctgcggcgtaatgccgttcgccaggcgctgcgccagcgggatcgaggcgtgggtcatactgaacggctggctcaccaggctctcaacgccgcccaggctctcagcgagggtaaacagcttcagtttactgatcacctctgccgcacgctggtcgtcgcctttgatcacgatggagatcatgccgcccggctgagccatctgctggcgcgcgagggcatactgcgggtgggatgtcagccacgggaaccagactttctcgacctgcggctgctgctcaagccagcgggccagcgccagggcgttgctgctgtggcgctcgatgcgcagggcgagggtgcggatcccgcgcagggtcaggaagctgctgaacggatcgagcacgccgcccaccgcattttgcaggtagcccagcttctccgccagcgccggacgatcgcccaccaccgccagcccggcgaccacgtcggagtggccgttgaggtatttggtggccgagtgcaccacgatatcaaagcccagcgtcagcgggcggtggatcagcggcgaggcaaaggtattatctgccacgctaatcacgttatgacggcgggcgatctcagcgatagccgccaggtccgccagcttcaacagcgggttggtgggggtctctacccagatcatccgcgtgtcgggacggatggcggcctccagtccggcgagatcgtccggcttcacccagctcacctgtagtccggtgctgcggcggcgtacgttctcaatcaggcggtaggtgccaccgtagacgtcgtcaatggcgacgatatggctatctttatccagcagctccagtacggtagagattgctgccaggccggaggcaaaagcgtagccgcgtgtgccgccctccagctcggcgatagcgctctccagggcgtggcgggttgggttgccgctgcgggagtattcgtagccggtgtgctggcccggtgcaggctgggcaaaggttgaggtggcatagataggcggcatcactgccccgtgctggtcgttaaaggccccgctatgcacgctgagggttgccagggcgctagcaggcgcggcgggcgcgggccgatcatcatcctgcaagccctgctggcgcagccactcatcgttaaacatgcgggagagatatttattgccgctgtcgcaggcgaaggtcaccacccgcttcggcgtcgtctgggcctggcagtagcgtagcgcggcggccagcagggtgccggtagaggagccggccagcaccccctccgtctgtaacagctgacgagcggtggcaaaggcctctgcatccgtgacccgatacgcctggcggacattctccagctgggcgaggggagggataaagtcctccccaatcccttcgacgcgccaggatcccgcctcgccgtgctgtccggtctcaacctgatccgccagaatcgagccaacgggatcggccagcacgaattcggtatgcggagagtgtttggcaaaccatgcctgcaagccacccagcgtgccgccggagccaacgcctactaccacggcatcaaccctgcctgccagctggtcgaacagctccggtgcggtggtggtggcgtgcgccagcgggttggccgggttagagaactgatcaatatagtaagcacccggcgtctcctctgccaggcggcgggcgtagtcctgatagtactccgggtggccctttgtcacgtcggagcgggtcaggcgcacatcaacacccagcgcacgcaggtggtagatct

SEQ ID NO: 20 - DNA, 1242 bp, Arabidopsis thaliana
ggtgagaatttcagatttcagaaatcgccatggcttcagtgactctaggttcatggattgttgttcaccaccacaatcatcatcatccatcttcaatccttaccaaatccagatccagatcttgtcctataactcttactaaacccatctcctttcgatcaaaacgcaccgtttcatcatcttcttcaatcgtttcttcttccgttgttacaaaagaagacaatctacgccaatctgaaccatcctctttcgatttcatgtcgtacatcatcaccaaagccgaattagtcaacaaagctttagattcagctgttcctctccgtgagccactcaagatccacgaagcgatgagttactctcttctcgccggtggcaaaagagttagaccagttctctgcatcgctgcttgtgaactcgtcggaggtgaagaatcaaccgctatgccagcacgttgcgccgtcgagatgattcacaccatgtcgttgatccacgacgatctcccttgtatggataacgacgatctccgccgtggaaaaccgaccaaccacaaagtgtttggtgaagacgtcgctgttttagccggagacgcgcttctctctttctctttcgagcatttagcttcggcgacgagttctgatgttgtttctccggtgagagtggttcgagccgttggagaattggctaaagcgataggaacagaagggttagtggcgggtcaagtcgtggatattagtagtgaagggttagatttaaacgacgtcggtttagagcatttggagtttatccatttgcataaaacggcggcgttgcttgaagcttctgctgttttgggagctattgttggtggaggaagtgatgatgagattgagaggttaagaaagtttgcgagatgtattggtttgttgtttcaggtggttgatgatatcttggatgtgacgaaatcgtcgaaagagttagggaaaactgctgggaaagatttgattgctgataagttgacgtatcctaagattatgggtttggagaaatcgagagagtttgctgagaaattgaatagagaggctcgtgatcagcttttagggtttgattctgataaggttgctcctttgttggctttggctaattacattgcctatagacagaactgatttgtgttcgattccttttgtcgggaatcattattagattggaattgtagaaatctcggacaggttctctagagtttgttggtgtaatcgtatccgg

SEQ ID NO: 21 - DNA, 2222 bp, Drosophila melanogaster
caatatgcaggccgcggaagaacttcaataacagtctgtttttggtctttccgtggtgtaattgatttgagttgtgcggataacgcgaaaaaccaatcgacgagcgtcggccagcaattctagtcacgcgtgtcgcgaagccaagcggtaaacaaaaagcacgccccacaccgcagtgacccccctccatcaacaccaacaccaccaccccccgcgctctatcaaaacaacaaaagcacacacgcaaggccacggcggagcagcaacaagaaaaacaacaacaacggcgacaacaatggaagaactgaacatcatattacagaagaccaaagataaatcaacgcaaaaggagcaggatgagattctgctgcagccctttacatacatacaacagattcctggcaagcaattccgctctgagttggccttggccttcaatcactggttgctcataccgggcgaaaagttggcgcagatcggagacattgtgcagatgctgcacaattccagtttgctcattgatgatattgaagacaattcgatccttcgcagaggtgtgcccgtggcgcattccatctacggcgtggccagcaccataaatgcggccaactatgcactctttctggcgctggagaaggtgcagcagctggatcatccggaggctaccaaggtgtacaccgaacaattgctggagctgcaccgtggacagggcatggagatctattggcgcgacagcttcacgtgtccatccgagtcggattacaagctgatgactgtgcgcaaaactggcggcctctttatgctggccattcgccttatgcagctgttcagctccaacaaggaggactattcgaagttgacggctatattgggcctgtactttcagatacgcgacgactattgcaatctgagtctgaaagagtacacggagaacaagagcttcgccgaggacttgacggagggcaagttcggcttcccggtaatccatgcggttcgcacccaaaagcaggataaacaggttctacacatattacgccagcgcacgcacgacattgaggtcaagaagtactgcatcaccttgttggaaaagctgggcagctttcagtatacacgcaaggttctggagtcgctcgacgcagaggctcggtcggaggtggctcgtctgggtagcaatccgtacatggaccgcctgctcaacaagctgctgtcgtggaagacgagcgatagcgccagcatcacgcagtcgaaccagatcaatcacaacaacgtctcacgcagcagccccaaccagaacacgttcaattgcaattagcagccaaagaggcaaaagagggagcagtcgtgaattgcgaacggcagagcctcttttgccgccaatccgggacagcagcaggccagcagccagccgacgcctgcgtgcctcagtgcgcccctgttgcgtttcctgcagaagctgaagatattctgagatttatgttaccctttgccaaaccgaaaagcccacagagaacccctaccttactgtcaaccgaaaccagagcgatgagaacggaaataggaggaggataggatttggatttgatagtgaatcggatgaaatgggatggataacaaaaccaacagcagccttacagaaaattgttaagccaaaagtaaattgatataagccaagcttatcgttgagctagcaaagagccatattacagcttttcaagaaatttgtttttttacttttacattttactttatacttttaatttagttttgcttcaaagttacgtagttagttagctcgtttagtttccccagttttagtttcgcccaacgaatgggagaggggggggtggggatcaagcaaatctcgcagagcattactgaattatagaatatgcaattttttagctcttgtatttctaagtgtgtttcgtattcgtaactcaattctgcaagcaattttcaatttctaagtgtcattttatcaaatctaactcactcggaactcaatgtgcacttcctttatcgacgttgttccattttaattgttatacaaatgcgattcgtatacatacatacatatgtactattaacgacaaattgttaatgttttatgcagacactataaaatcaacacaaatgaacgcaactatatatattgaaataatgataatgatgcactgcacggcaggtttttgcacattgcaccacctaaaaaaaaaaaaaaa

SEQ ID NO: 22 - protein, 335 aa, Saccharomyces cerevisiae [sequence omitted]

SEQ ID NO: 23 - protein, 335 aa, Drosophila melanogaster
MEELNIILQKTKDKSTQKEQDEILLQPFTYIQQIPGKQFRSELALAFNHWLLIPGEKLAQIGNIVQMLHNSSLLIEDNSILRRGVPVAHSIYGVASTINAANYALFLALEKVQQLDHPEVRKVYTEQLLELHRGQGMEIYWRDSFTCPSESDYKLMTVRKTGGLFMLAIRLMQLFSSNKEDYSKLTAILGLYFQIRDDYCNLSLKEVSVNKSFAEDLTEGKFGFPVIHAVRTQKQDKQVLRKSSQRTHDIEVKKYCITLLEKLGSFQYTRKVLESLDAEARSEVSTLGSNPYMDRLLNKLLSWKTSDSASITQSNQINHNNVSRSSPNQNTFNCN

SEQ ID NO: 24 - protein, 338 aa, Drosophila melanogaster
MEELNIILQKTKDKSTQKEQDEILLQPFTYIQQIPGKQFRSELALAFNHWLLIPGEKLAQIGDIVQMLHNSSLLIDDIEDNSILRRGVPVAHSIYGVASTINAANYALFLALEKVQQLDHPEATKVYTEQLLELHRGQGMEIYWRDSFTCPSESDYKLMTVRKTGGLFMLAIRLMQLFSSNKEDYSKLTAILGLYFQIRDDYCNLSLKEYTENKSFAEDLTEGKFGFPVIHAVRTQKQDKQVLHILRQRTHDIEVKKYCITLLEKLGSFQYTRKVLESLDAEARSEVARLGSNPYMDRLLNKLLSWKTSDSASITQSNQINHNNVSRSSPNQNTFNCN

SEQ ID NO: 25 - protein, 300 aa, Cyanophora paradoxa
MKPLQTNFNLLTYLYERKEIVEDTLNKSIPRGNPTFIYDSIRYSLSAGGKRIRPILCLASCELAGGTMEMALPTACALEMIHTMSLIHDDLPAMDNDSYRRGKPTNHIIYGEDLAILAGDALLAYAFEFIATQTKNVPADLIVKVIAQVAHSVTTSGLVGGQIIDLSSEGKSDTTLETLNFIHIHKTGALLEAAVLSGALLAGAKEKDMNRFLRYAQNIGLAFQIIDDVLDIISTEEKLGKSIGKDLKTQKATYPSFWGVEESIKQAELLVEEAKEEILYFDNKAIPLIAIADFIVNRNN

SEQ ID NO: 26 - protein, 376 aa, Oryza sativa
MHVLAQSTAVAKVAASGCLRRSPNPSVTFQRSPSLLLSPAACRRRCRRGCSVSVDVRCSLGAMVTPELNGGDVGVGVGGGSFDFQRYLSARADAVHDALDRAMPRGFPERLCESMRYSVLAGGKRVRPVLALAACELVGGDAAAATPVACAVEMIHTMSLIHDDMPCMDDDALRRGRPSNHVAFGEFTALLAGDALHALAFEHVARGCGDHGVPADRTLRAVAELGSASGTGGVAAGQVADKESEGLPVSLAMLEYIHVHKTARLLEAAAVSGAIVGGGADAEVERVRRYARCVGLLFQVVDDVLDMTSTSEQLGKTAGKDVEADKATYPKLLGVDKAREYAADLLAMAEAELDGFDAERAAPLRHLARFIAYRQH

SEQ ID NO: 27 - protein, 291 aa, Chlamydia trachomatis
MDYFSVYRSKVEKKLRDSLGDFGNTQGGLRDPIEYALLGGGKRVRPLLVGLFAEGVHKERDVLDTAIAIEYIHTSTLIADDLPCMDDDDMRRGKPSVHKAFDEASALLASYALIPAAYARIRKNAKALKAVVSCEQDVEEAYEDILELIELRFGVGGILGGQYEDIFFHDFSKENVLGIIKKKTGALFEIACVSGWLFGGGERESSTLVAEFAEHFGLLFQIRDDLADLSQDDQEEKHMNYALLFGEVAAKELLDHSFESCIKNLHLLQERGLECLEPLEMLCKNVFCGWK

SEQ ID NO: 28 - protein, 354 aa, Thermoplasma acidophilum
MQIETEDPHETINNYKLRIDERISRFFDRKEAETKDDLSRRVIRMIREYTEGGGKRLRPIFLVLGYRLFADENNAIFDASISIELAQSYLLIHDDVIDDSDLRRGKPSMHIRLWRSFFPESEKGKKMGEGLAIVAGDLAETYAHESLINSDFDPSLLLLADMELTKTIEMTGYGQFLDVVSGTLNDFRENDLIRLHLWKTARYTLEGPLAMGALLSGRHDQIMDLRLFGRTLGIAFQLKDDILGLFGDEATTGKSIYSDVNEGKRTLLMIKAMEFSDRQDAEFIDRILRRGNVTQEEFERIRNIVMKSGSYDYSVKLMDSLVAKSKEYLNRIRGNSCAKTYLSWLSDYLVARDH

SEQ ID NO: 29 - protein, 360 aa, Arabidopsis thaliana
MATTVHLSSSSLFSQSRGRRDNSISSVKSLRKRTVLSLSSALTSQDAGHMIQPEGKSNDNNSAFDFKLYMIRKAESVNAALDVSVPLLKPLTIQEAVRYSLLAGGKRVRPLLCIAACELVGGDEATAMSAACAVEMIHTSSLIHDDLPCMDNADLRRGKPTNHKVYGEDMAVLAGDALLALAFEHMTVVSSGLVAPEKMIRAVVELARAIGTTGLVAGQMIDLASERLNPDKVGLEHLEFIHLHKTAALLEAAAVLGVIMGGGTEQEIEKLRKYARCIGLLFQVVDDILDVTKSTEELGKTAGKDVMAGKLTYPRLIGLEGSREVAEKLRREAEEQLLGFDPSKAAPLVALASYIACRHN

SEQ ID NO: 30 - protein, 371 aa, Mycobacterium aurum
MASRSQVATDPPVGAGPTATRWLAPLRRAVLGAVTEFLDTHCREALYGAHVDITELVLRGMLAEGKCVRSTYLYLGWQCGAPADEAALRAAASLELLHAFALLQDDVMDESPMRRGRPSAHRAFERWHRERGLPGSSARFGESAAVLLGDLCLVWAEQMLRESGVDEAALTRAWPRYDAMRTELAVGQFADLVNDTAGFPQLDEVLDVARRKSGNYTVRRPLEIGAALAGCDAEVITVLGRYGEAIGEAFQLRDDLLGVFGAPQTTGKPTGTDLVARKATTVVVAGYELATGAQQRQFKEFMTAPELSSGDVTRWQALISEVGTVQRIEDMIHRRFAVAVQALDSLDATRLDADARSALVAMASACTERIA

SEQ ID NO: 31 - protein, 229 aa, Chlamydophila pneumoniae
HDVMDSALAVEFVHTSTLIADDLPCMDNDDERRGRPTVHKAFDEATALLASYALIPAAYSHLRLNAKKLKEQGCDPREIDIAYNIIGDITDKNIGCSGVLGGQYDDMFFSNRGQEHVQSIMIKKTGSLFEIACISGWLFGGGDPQFAPIITSFSNNFGLLFQIKDDFSDLQKDSQQIGLNYALLFGEKAALELLARSQNNCLELLDRLSAGGLKNSSEFETIISSLGSF

SEQ ID NO: 32 - protein, 343 aa, Arabidopsis thaliana
MLCKIIIMRPCYSLVLSAMRLIRPSNRRLSSIASSDSEFISYMNNKAKSINKALDNSIPLCNNSVPLWEPVLEVHKAMRYTLLSGGKRVRPMLCLVACELVGGQESTAMPAACAVEMIHAASLILDDLPCMDDDSLRRGIPTNHKVFGEKTSILASNALMSLAVKQTLASTSLGVTSERVLRAVQEMARAVGTEGLVAGQAADLAGERMSFKNEDDELRYLELMHVHKTAVLVEAAAVVGAIMGGGSDEEIERLKSYARCVGLMFQVMDDVLDETKSSEELGKTAGKDLITGKLTYPKVMGVDNAREYAKRLNREAQEHLQGFDSDKVVPLLSLADYIVKRQN

SEQ ID NO: 33 - protein, 373 aa, Arabidopsis thaliana
QILFLYLSLFILSLNFFFTNLKPRLVRLFQPSLESRVKTALLSRKEVAAFLDSPIVEDEEGEEREEEEEGGIVSNANFTFEFDPYMMSKAESVNKALEEAIPVGEPLKIHEAMRYAILAAGKRVRPILCLASCELVGGQENAAMPAACAVEMIHTMSLIKDDLPCMDNDDLRRGKPTTHKVYGEGVAILSGGALLSLAFEHMTTAEISSERMVWAVRELARSIGTRGLVAGQAMDISSEGLDLNEVGLEHLEFIHVHKTAVLLETAAVLGAIIGGGSDEEIESVRKFARCIGLLFQVVDDILDETKSSEELGKTAGKDQLAGKLTYPKLIGLEKSKEFVKRLTKDARQHLQGFSSEKVAPLVALTTFIANRNK

SEQ ID NO: 34 - protein, 303 aa, Mucor circinelloides f. lusitanicus
MLNSHNRTEERSTEDIILEPYTYLISQPGKDIRAKLISAFDLWLHVPKDVLCVINKIIGMLHNASLMIDDVQDDSDLRRGVPVAHHIYGVPQTINTANYVIFLALQEVMKLNIPSMMQVCTEELINLHRGQGIELYWRDSLTCPTEEEYIDMVNNKTSGLLRLAVRLMQAASESDIDYTPLVNIIGIHFQVRDDYMNLQSTSYTNNKGFCEDLTEGKFSFPIIHAIRKDPSNRQLLNIISQKPTSIEVKKYALEVIRKAGSFEYVREFLRQKEAESLKEIKRLGGNPLLEKYIETIRVEATND

SEQ ID NO: 35 - protein, 347 aa, Arabidopsis thaliana
MTTLNLSIFPSVKISSSASIPGFIKIQPFLLRRKLSTVLSVTARDEGIIHNHFDFTSYMIGKANAVNEALDSAVSLREPIKIHEAIRYSLLARGKRVRPVLCIAACELVGGEESVALPAACAVEMIHTMSLIHDDLPCMDNDDLRRGKPTNHKVFGEDVAVLAGDALISFAFEHLATSTAVSPARVVRAIGELAKAIGSKGLVAGQVVDLTSGGMDQNDVGLEVLEFIHVHKTAVLLEAATVLGAIVGGGSDEEVEKLRRFARCIGLLFQVVDDILDVTKSSEELGKTAGKDLIADKLTYPKLMGLEKSKDFADKLLSDAHEQLHGFDSSRVKPLLALANYIAKRQN

SEQ ID NO: 36 - protein, 372 aa, Arabidopsis thaliana
MEAQNIFLYLLIVFLSLHFVFTTLKGRLSPANTRRLIRLLHIPIKSPVAAAIFARKDTREFLDSSIKLVNEEDDFGFSFDFKPYMISKAETINRALDEAIPLIEPLNIHKAMRYAILAGGKRVRPILCLAACELVGGEERLAIQAACAVEMIHTMSLIKDDLPCMDNDDLRRGKPTTHKVFGESVAILSGGALLALAFEHLTEADVSSKKMVRAVKELAKSIGTKGLVAGQAKDLSSEGLEQNDVGLEDLEYIHVHKTGSLLEASAVIGAVIGGGTEKEIEKVRNFARCIGLLFQVVDDILDETKSSEELGKTAGKDKVAGKLTYPKVIGVEKSKEFVEKLKRDAREHLQGFDSDKVKPLIALTNFIANRNH

SEQ ID NO: 37 - protein, 326 aa, Arabidopsis thaliana
MLFSGSAIPLSSFCSLPEKPHTLPMKLSPAAIRSSSSSAPGSLNFDLRTYWTTLITEINQKLDEAIPVKHPAGIYEAMRYSVLAQGAKRAPPVMCVAACELFGGDRLAAFPTACALEMVHAASLIHDDLPCMDDDPVRRGKPSNHTVYGSGMAILAGDALFPLAFQHIVSHTPPDLVPRATILRLITEIARTVGSTGMAAGQYVDLEGGPFPLSFVQEKKFGAMGECSAVCGGLLGGATEDELQSLRRYGRAVGMLYQVVDDITEDKKKSYDGGAEKGMMEMAEELKEKAKKELQVFDNKYGGGDTLVPLYTFVDYAAHRHFLLPL

SEQ ID NO: 38 - protein, 371 aa, Arabidopsis thaliana
MASVTLGSWIVVHHHNHHHPSSILTKSRSRSCPITLTKPISFRSKRTVSSSSSIVSSSVVTKEDNLRQSEPSSFDFMSYIITKAELVNKALDSAVPLREPLKIHEAMRYSLLAGGKRVRPVLCIAACELVGGEESTAMPAACAVEMIHTMSLIHDDLPCMDNDDLRRGKPTNHKVFGEDVAVLAGDALLSFAFEHLASATSSDVVSPVRVVRAVGELAKAIGTEGLVAGQVVDISSEGLDLNDVGLEHLEFIHLHKTAALLEASAVLGAIVGGGSDDEIERLRKFARCIGLLFQVVDDILDVTKSSKELGKTAGKDLIADKLTYPKIMGLEKSREFAEKLNREARDQLLGFDSDKVAPLLALANYIAYRQN

SEQ ID NO: 39 - protein, 288 aa, Rhodobacter sphaeroides
MAFEQRIEAAMAAAIARGQGSEAPSKLATALDYAVTPGGARIRPTLLLSVATRCGDSRPALSDAAAVALELIHCASLVHDDLPCFDDAEIRRGKPTVHRAYSEPLAILTGDSLIVMGFEVLAGAAADRPQRALQLVTALAVRTGMPMGICAGQGWESESQINLSAYHRAKTGALFIAATQMGAIAAGYEAEPWEELGARIGEAFQVADDLRDALCDAETLGKPAGQDEIHARPSAVREYGVEGAAKGLKDILGGAIASIPSCPAEAMLAEMVRRYADKIVPAQVAARV

SEQ ID NO: 40 - protein, 302 aa, Synechocystis sp.
MVAQQTRTDFDLAQYLQVKKGVVEAALDSSLAIARPEKIYEAMRYSLLAGGKRLRPILCITACELCGGDEALALPTACALEMIHTMSLIHDDLPSMDNDDFRRGKPTNHKVYGEDIAILAGDGLLAYAFEYVVTHTPQADPQALLQVIARLGRTVGAAGLVGGQVLDLESEGRTDITPETLTFIHTHKTGALLEASVLTGAILAGATGEQQQRLARYAQNIGLAFQVVDDILDITATQEELGKTAGKDVKAQKATYPSLLGLEASRAQAQSLIDQAIVALEPFGPSAEPLQAIAEYIVARKY

SEQ ID NO: 41 - protein, 376 aa, Oryza sativa; identical to SEQ ID NO: 26

SEQ ID NO: 42 - protein, 351 aa, Scoparia dulcis
MSLVNPVSTWPNPTRSSVFRPKPAILNTTHLPISFLFAGKPISAVLTKEYSHQTSSTFDFKKYMLEKASSVNKALESAVSLKEPLKIHESMRYSLLAGGKRVRPMLCLAACELVGGHPSTAMPAACSIEMIHTMSLMHDDLPCMDNDHLRRGHPTNHIVFGEDVAVLAGDALLAYSFEYLATATEGVLPERIVRVIAELAKCIRSEGLLAGQVVDICSEGVSEIGLEHLEYIHLHKTAALLEGSVVLGAILGGGNDEEVERLRKFARCIGLLFQVVDDILDVTKTSVELGKTAGKDLVADKTTYPKLIGIEKSREFAEKLNREAQEQLVGFDSDKAAPLIALANYIAYREN

SEQ ID NO: 43 - protein, 368 aa, Croton sublyratus
MSSVNLGSWVHTSSVISQATRSRSKSKPLSFSPVSIPLFYRNSKRSVSYVSAIVTKDEETIQEEQNKNSSSSLGFDFKSYMVQKASAINQALEAAVSLREPLKIHESMRYSLLAGGKRVRPALCLAACELVGGDESMAMPAACAVEMIHTMSLIHDDLPCMDNDDLRRGKPTNHIVFGENVAVLAGDALLAFAFEHIAVSTLNVSPVRIVRGVGELAKAIGAEGLVAGQVVDICSEGLSEVDLEKLEFIHIHKTAKLLEGAVVLGAIMGGGTDEEVEKLRKYARDIGLLFQVVDDILDVTKSSQELGKTAGKDLVADKVTYPKLMGIEKSREFAEKLNKEAQEQLAGFDPEKAAPLIALANYIAYRQN

SEQ ID NO: 44 - protein, 392 aa, Streptomyces coelicolor
MRTTESEKGLRMPGLPPMVAPPAEQVDDPVTATDAANAVDAVLRGVLDERLRHCRAVDPLFARELADRLAALTARGGKRLRTAFAHCGWRAAGGSGDATAVLRTGAALELLQACALVHDDVMDGSVQRRGAPALHVDLARGHWAAGMHGSSESFGTSAAVLTGDLALAWADDLLTETALGTPHGPRLHGEWRAMRTEMVAGQYRDLHAQAARSSGVDEALAIATLKSALYTVARPLALGAVLAGAADGDALEALRAAGRCAGLAFQLRDDLLGAFGDPALTGKPADDDLRSRKLTYLLAVAVRLADAADDHLAAAALAPDADPKSEKAVRQVRSALVRTGARDLVETKIGELTDMSLAHFDRCGARPAVRHEFAALIGRATGAVPRGTGEVV

SEQ ID NO: 45 - protein, 291 aa, Paracoccus marcusii
MRRDVNPIHATLLQTRIEEIAQGFGAVLQPLGAAMAALSSGKRFRGMLMLLAAEASGGVCDTIVDAACAVEMVHAASLIFDDLPCMDDAGLRRGQPATHVAHGESRAVLGGIALITEAMALLAGARGASGTVRAQLVRILSRSLGPQGLCAGQDLDLHAAKNGAGVEQEQDLKTGVLFIAGLEMLAVIKEFDAEEQTQMIDFGRQLGRVFQSYDDLLEVVGDQAALGKDTGRDAAAPGPRRGLLAVSDLQKVSRQYEASRAQLEGMVGSKRLQAPEIEALLERVLPYAARA

SEQ ID NO: 46 - protein, 300 aa, Human [sequence omitted]

SEQ ID NO: 47 - protein, 371 aa, Arabidopsis thaliana; identical to SEQ ID NO: 38

SEQ ID NO: 48 - protein, 326 aa, Arabidopsis thaliana; identical to SEQ ID NO: 37

SEQ ID NO: 49 - protein, 393 aa, Taxus canadensis
MAYTAMAAGTQSLQLRTVASYQECNSMRSCFKLTPFKSFHGVNFNVPSLGAANCEIMGHLKLGSLPYKQCSVSSKSTKTMAQLVDLAETEKAEGKDIEFDFNEYMKSKAVAVDAALDKAIPLEYPEKIHESMRYSLLAGGKRVRPALCIAACELVGGSQDLAMPTACAMEMIHTMSLIHDDLPCMDNDDFRRGKPTNHKVFGEDTAVLAGDALLSFAFEHIAVATSKTVPSDRTLRVISELGKTIGSQGLVGGQVVDITSEGDANVDLKTLEWIHIHKTAVLLECSVVSGGILGGATEDEIARIRRYARCVGLLFQVVDDILDVTKSSEELGKTAGKDLLTDKATYPKLMGLEKAKEFAAELATRAKEELSSFDQIKAAPLLGLADYIAFRQN

SEQ ID NO: 50 - protein, 356 aa, Helianthus annuus
MRPMSLVHSCSIFTGSSFIKTTPINNKPTFKIHQRPTIRSTISAAIVEEEVVELQQKPKPTFNFNAYMLGKGNSVHKALDESIMIKNPPTIHEAMRYSLLAGGKRVRPILCIAACELVGGEEATAMPAACAVEMIHTMSLIHDDLPCMDNDDFRRGKPTNHKVYGEDVAVLAGDSLLAFAFEYVSSRTEGASPARVLAAIGELAKSIGTEGLVAGQVVDIASTGGQDIGLDQLEFIHIHKTAALLEASVVLGAILGGGSDAQVEKLRTFARCIGLLFQVVDDILDVTKSSEELGKTAGKDLLVDKTTYPKLLGLDKSRQFAEELLAEAKQQLEEFESQAAVAPLLALAEYIAYRQN

SEQ ID NO: 51 - protein, 352 aa, Mycobacterium tuberculosis
MAGAITDQLRRYLHGRRRAAAHMGSDYDGLIADLEDFVLGGGKRLRPLFAYWGWHAVASREPDPDVLLLFSALELLHAWALVHDDLIDRSATRRGRPTAQLRYAALHRDRDWRGSPDQFGMSAAILLGDLAQVWADDIVSKVCQSALAPDAQRRVHRVWADIRNEVLGGQYLDIVAEASAAESIESAMNVATLKTACYTVSRPLQLGTAAAADRSDVAAIFEHFGADLGVAFQLRDDVLGVFGDPAVTGKPSGDDLKSGKRTVLVAEAVELADRSDPLAAKLLRTSIGTRLTDAQVRELRTVIEAVGARAAAESRIAALTQRALATLASAPINATAKAGLSELAMMAANRSA

SEQ ID NO: 52 - protein, 262 aa, Aquifex aeolicus
MERIETWKEKIEKRLNEILKPEGPEELIEAMKYYPLQKGKRIRPLFTVAVASALGGNEDDAITVGSGIELIHNYSLIHDDLPCMDNDVWRRGLPTCHIKFGEAMALLAGDALLTYTFEVLSQRENYKTLSCEEILEINKIIAQKAGSNGMVGGQVLDIKGYEDLYEVSVKKTGALFEACFMCGAVVAKRREKLKEMESIGRKVGLLFQMVDDYLDKDGFYEKLGECLKEEIKKLYEELKEKEIFKESQELRYLLDLIYKRIT

SEQ ID NO: 53 - protein, 366 aa, Sinapis alba
MASSVTPLGSWVLLHHHPSTILTQSRSRSPPSLITLKPISLTPKRTVSSSSSSSLITKEDNNLKSSSSSFDFMSYIIRKADSVNKALDSAVPLREPLKIHEAMRYSLLAGGKRVRPVLCIAACELVGGEESLAMPARCAVEMIHTMSLIHDDLPCMDNDDLRRGKPTNHKVYGEDVAVLAGDALLSFAFEHLASATSSEVSPARVVRAVGELAKAIGTEGLVAGQVVDISSEGLDLNNVGLEHLKFIHLHKTAALLEASAVLGGIIGGGSDEEIERLRKFARCIGLLFQVVDDILDVTKSSQELGKTAGKDLIADKLTYPKLMGLEKSREFAEKLNTEARDQLLGFDSDKVAPLLALANYIANRQN

SEQ ID NO: 54 - protein, 222 aa, Arabidopsis thaliana
TSSLIHDDLPCMDNADLRRGKPTNHKVYGEDMAVLAGDALLALAFEHMTVVSSGLVAPERMIRAVVELARAIGTTGLVAGQMIDLASERLNPDKVGLEHLEFIHLHKTAALLEAAAVLGVIMGGGTEEEIEKLRKYARCIGLLFQVVDDILDVTKSTEELGKTAGKDVMAGKLTYPRLIGLERSKEVAEKLRREAEEQLLGFDPSKAAPLVALASHIAFRHN

SEQ ID NO: 55 - protein, 357 aa, Catharanthus roseus
MRSNLCHPLKNQLPISFFLSGTIRKPIFSCSRLSISAIITKEQTQEESESKSKKEVAFSSSSSFDFKAYMIGKANSVNKALEDAVLVREPLKIHESMRYSLLAGGKRVRPMLCIAACELFGGTESVAMPSACAVEMIHTMSLMHDDLPCMDNDDLRRGKPTNHKVFGEDVAVLAGDALLAFAFEHIATATKGVSSERIVRVVGELAKCIGSEGLVAGQVVDVCSEGIADVGLEHLEFIHIHKTAALLEGSVVLGAIVGGANDEQISKLRKFARCIGLLFQVVDDILDVTKSSQELGKTAGKDLVADKVTYPKLLGIDKSREFAEKLNREAQEQLAEFDPEKAAPLIALANYIAYRDN

SEQ ID NO: 56 - protein, 369 aa, Capsicum annuum
MRSMNLVDLWAQQACLVFNQTLSYKSFNGFMKIPLKNSKINPKLNKKRPFSPLTVSAIATTKEDERIEAAQTEEPFNFKIYVTEKAISVNKALDEAIIVKEPHVIHEAMRYSLLAGGKRVRPMLCLAACELVGGNQENAMAAACAVEMIHTMSLIHDDLPCMDNDDLRRGKPTNHKIYGEDVAVLAGDSLLAFAFEHIVNSTAGVTPSRIVGAVAELAKSIGTEGLVAGQVADIKCTGNASVSLETLEFIHVHKTAALLESSVVLGAILGGGTNVEVEKLRRFARCIGLLFQVVDDILDVTKSSEELGKTAGKDLVVDKTTYPKLLGLEKAKEFAAELNREAKQQLEGFDSRKAAPLIALADYIAYRDN

SEQ ID NO: 57 - protein, 157 aa, Arabidopsis thaliana
AVEMMHTMSLIKDDLPCMDNDDLRRGKPTTHKVFGESVAILSGGALLALAFEHLTEADVSSKKMVRAVKELAKSIGTKGLVAGQAKDLSSEGLEQNDVGLEDLEYIHVHKTGSLLEASAVIGAVIGGGTEKEIEKVRNFARCIGLLFQVVDDILDVT

SEQ ID NO: 58 - protein, 425 aa, Streptomyces griseus
MGRRQPTKHSFSDSPRPAHDVRGGRHHTPSSEDARVVDSDVVGSVLRTARAVLADRIDEAVRSDASFCEELARRVADFTLEGGKRMRPRLLWWGMRSCGAAETAAALRLGVALELIQSCALIHDDVMDRSRLRRGKPAMHIGLAERAGLSPDSERGSDFGASAAVLAGDLALVWADDTVAETVLSAAQRRRIGALWRAMRTEMVAGQYLDLRGQLSGGSSVAQALRTACLKSASYSVERPLAIGAALAGADDRTTDALRSAGRCAGIAFQLRDDLLGVFGDPALTGKPSGDDIREGKSTYLLAVARNSAEASGDEQALAVLGRATGNADLTEEDLADVRGVLEVTGARAHVERKAEHLRDHAVRRLGQAVDVDAHGGRQLLGLLRTVSGERTAHSPTTAGETHGGGTGVAGASPVLMTTEGGNAG

SEQ ID NO: 59 - protein, 316 aa, Lupinus albus
MLTKEDTVKDKEEEEEEEEKPRFNFNLYMVEKSRSVNQALNDAVSLREPHKIHEAMRYSLLAGGKRVRPVLCIAACEVVGGNESTAMAAACSIEMIHTMSLIHDDLPCMDNDDLRRGKPTNHKVFGENIAVLAGDALLAFAFEHIAVSTSGVSPERIIGAIGELAKSIGTEGLVAGQVVDINSEGLCDIGLEKLEFIHLHKTAALLEGSVVVGAILGGGCNEEVEKLRMFARYIGLMFQVVDDVLDVTKSSKELGKTAGKDLVADKVTYPKLLGIEKSNEFAQKLNRDAQEQLSGFDPVKVAPLIALANYIAYSPN

SEQ ID NO: 60 - protein, 326 aa, Arabidopsis thaliana
MLFSGSAIPLSSFCSLPEKPHTLPMKLSPAAIRSSSSSAPGSLNFDLRTYWTTLITEINQKLDEAIPVKHPAGIYEAMRYSVLPQGPKRAPPVMCVAACELFGGDRLAAFPTACALEMVHAASLIHDDLPCMDDDPVRRGKPSNHTVYGSGMAILAGDALFPLAFQHIVSHTPPDLVPRATILRLITEIARTVGSTGMAAGQYVDLEGGPFPLSFVQEKKFGAMGECSAVCGGLLGGATEDELQSLRRYGRAVGMLYQVVDDITEDKKKSYDGGAEKGMMEMAEELKEKAKKELQVFDNKYGGGDTLVPLYTFVDYAAHRHFLLPL

SEQ ID NO: 61 - protein, 300 aa, Cyanophora paradoxa; identical to SEQ ID NO: 25

SEQ ID NO: 62 - protein, 371 aa, Arabidopsis thaliana
MASVTLGSWIVVHHHNHHHPSSILTKSRSRSCPITLTKPISFRSKRTVSSSSSIVSSSVVTKEDNLRQSEPSSFDFMSYIITKAELVNKALDSAVPLREPLKIHEAMSYSLLAGGKRVRPVLCIAACELVGGEESTAMPARCAVEMIHTMSLIHDDLPCMDNDDLRRGKPTNHKVFGEDVAVLAGDALLSFSFEHLASATSSDVVSPVRVVRAVGELAKAIGTEGLVAGQVVDISSEGLDLNDVGLEHLEFIHLHKTAALLEASAVLGAIVGGGSDDEIERLRKFARCIGLLFQVVDDILDVTKSSKELGKTAGKDLIADKLTYPKIMGLEKSREFAEKLNREARDQLLGFDSDKVAPLLALANYIAYRQN

SEQ ID NO: 63 - protein, 344 aa, Arabidopsis thaliana
MENREVFVYIVISIFRSLQFLFWRFRPRYNDVTSALTRPLTSAASYDFKFMSYMVNKAKSVNKALEEAVPLREPELKIREAMRYTLLSDGKRVRPMLCLAACELVGGQESTAMSAACAIEMLHASSLILDDLPCMDNDSLRRGKPTNHIVFGESIAILASQALIALAVQKTTSSTFADVPPERILKTVQEMVKAVEGLVAGQQADLAGEGMRFDSDTGLEHLEFIHIHKTAALLEAAAVMGAIMGGGSDEEIERLRSYARCIGLMFQVVDDVLDVTKSSEELGKTAGKDLIAGKLTYPRLMGVEKSKEYAERLNIEAREHLLGFDIDKVAPLVSLADYIVNRQN

SEQ ID NO: 64 - protein, 343 aa, Arabidopsis thaliana; identical to SEQ ID NO: 32

SEQ ID NO: 65 - protein, 336 aa, Arabidopsis thaliana
MRPRYSLILSAMRLIRPSNRRLSSIASSDSEFISYMKNKAKSINKALDNSIPLCNNFVPLWEPVLEVHKAMRYTLLPGGKRVRPMLCLVACELVGGQESTAMPAACAVEMIHAASLILDDLPCMDDDSLRRGKPTNHKVFGEKTSILASNALRSLAVKQTLASTSLGVTSERVLRAVQEMARAVGTEGLVAGQAADLAGERMSFKNEDDELRYLELMHVHKTAVLVEAAAVVGAIMGGGSDEEIERLKSYARCVGLMFQVMDDVLDETKSSEELGKTAGKDLITGKLTYPKVMGVDNAREYAKRLNREAQEHLQGFDSDKVVPLLSLADYIVKRQN

SEQ ID NO: 66 - protein, 300 aa, Cyanophora paradoxa; identical to SEQ ID NO: 25

SEQ ID NO: 67 - protein, 376 aa, Oryza sativa; identical to SEQ ID NO: 26

SEQ ID NO: 68 - protein, 292 aa, Chlamydia muridarum
MDDFNVYRSKIEKRLRDSLEDFGKTQSGLRNPIEYALLGGGKRVRPLLVCLFADSIQKRRDVLDTAIAVEYIHTSTLIADDLPCMDNDDMRRGKPSVHKAFDEASALLASYALIPAAYARIRKNAKALKEVVSVQREIEDAYEDVLDLIELRFGVEGVLGGQYEDVFFQSFTEESVINIINKKTSALFEIACVSGWLFGGGAREKTPLVIEFARNFGILFQIGDDLADLSQDNQEEKHMNYALLFGEQAAKDLLNRSFNSCIEILHLLKEKGVKPLEELCKKVFMGGNKHSL

SEQ ID NO: 69 - protein, 392 aa, Streptomyces coelicolor; identical to SEQ ID NO: 44

SEQ ID NO: 70 - protein, 323 aa, Synechocystis sp
MISTTSLFAPVDQDLRLLTDNLKRLVGARHPILGAAAEHLFEAGGKRVRPAIVLLVSRATLLDQELTARHRRLAEITEMIHTASLVHDDVVDEADLRRNVPTVNSLFDNRVAVLAGDFLFAQSSWYLANLDNLEVVKLLSEVIRDFAEGEILQSINRFDTDTDLETYLEKSYFKTASLIANSAKAAGVLSDAPRDVCDHLYEYGKHLGLAFQIVDDILDFTSPTEVLGKPAGSDLISGNITAPALFAMEKYPLLGKLIEREFAQAGDLEQALELVEQGDGIRRSRELAANQAQLARQHLSVLEMSAPRESLLELVDYVLGRLH

SEQ ID NO: 71 - protein, 289 aa, Chlamydophila pneumoniae
MLHALDTYRPSIESAIEKALEGFGPIGHPIRSPVEYALQGGGKRLRPGLVCMMAQGLGLNHDVMDSALAVEFVHTSTLIADDLPCMDNDDERRGRPTVHKAFDEATALLASYALIPAAYSHLRLNAKKLKEQGCDPREIDIAYNIIGDITDKNIGCSGVLGGQYDDMFFSNRGQEHVQSIMIKKTGSLFEIACISGWLFGGGDPQFAPIITSFSNNFGLLFQIKDDFSDLQKDSQQIGLNYALLFGEKAALELLARSQNNCLELLDRLSAGGLKNSSEFETIISSLGSF

SEQ ID NO: 72 - protein, 376 aa, Arabidopsis thaliana
MEPQILFLYLSLFILSLNFFFTNLKPRLVRLFQPSLESRVKTALLSRKEVAAFLDSPIVEDEEGEEREEEEEGGIVSNANFTFEFDPYMMSKAESVNKALEEAIPVGEPLKIHEAMRYAILAAGKRVRPILCLASCELVGGQENAAMPAACAVEMIHTMSLIKDDLPCMDNDDLRRGKPTTHKVYGEGVAILSGGALLSLAFEHMTTAEISSERMVWAVRELARSIGTRGLVAGQAMDISSEGLDLNEVGLEHLEFIHVHKTAVLLETAAVLGAIIGGGSDEEIESVRKFARCIGLLFQVVDDILDETKSSEELGKTAGKDQLAGKLTYPKLIGLEKSKEFVKRLTKDARQHLQGFSSEKVAPLVALTTFIANRNK

SEQ ID NO: 73 - protein, 302 aa, Synechocystis sp; identical to SEQ ID NO: 40

SEQ ID NO: 74 - protein, 378 aa, Arabidopsis thaliana
MKNGTTILFLYLSLFILSLNFFFTNLKPRLVRLFQPSLESRVKTALLSRKEVAAFLDSPIVEDEEGEEREEEEEGGIVSNANFTFEFDPYMMSKAESVNKALEEAIPVGEPLKIHEAMRYAILAAGKRVRPILCLASCELVGGQENATIPAACAVEMIHTMSLIKDDLPCMDNDDLRRGKPTTDKVYGEGVAILSGGALLSLAFEHMTTAEISSERMVWAVRELARSIGTRGLVAGQAMDISSEGLDLNEVGLEHLEFIHVHKTAVLLETAAVLGAIIGGGSDEEIESVRKFARCIGLLFQVVDDILDETKSSEELGKTAGKDQLAGKLTYPKLIGLEKSKEFVKRLTKDARQHLQGFSSEKVAPLVALTTFIANRNK

SEQ ID NO: 75 - protein, 222 aa, Arabidopsis thaliana; identical to SEQ ID NO: 54

SEQ ID NO: 76 - protein, 335 aa, Drosophila melanogaster; identical to SEQ ID NO: 23

SEQ ID NO: 77 - protein, 338 aa, Drosophila melanogaster; identical to SEQ ID NO: 24

SEQ ID NO: 78 - protein, 360 aa, Arabidopsis thaliana
MATTVHLSSFSLFIQSRGRRDNSISSVKSLKKRTGLSPSSALTSQGGRDMIPPEGKCNDHNSAFDFKLYMIRKAESVNAALDVSVPLREPLTVQEAVRYSLLAGGKRVRPLLCIAVCELVGGDEATAMSAACAVEMIHTSSLIHDDLPCMDNADLRRGKPTNHKVYGEDMAVLAGDALLALAFEHMTVVSSGLVAPERMIRAVVELARAIGTTGLVAGQMIDLASERLNPDKVGLEHLEFIHLHKTAALLEAAAVLGVIMGGGTEEEIEKLRKYARCIGLLFQVVDDILDVTKSTEELGKTAGKDVMAGKLTYPRLIGLERSKEVAEKLRREAEEQLLGFDPSKAAPLVALASYIACRHN

SEQ ID NO: 79 - protein, 360 aa, Arabidopsis thaliana
MANTVHLSSSSLFIQTRGRKYNSILSFNNLQKRTVLSLSCALTSQGGKDMIPPKGKSNDRNFAFDFKSYMIRKAESVSMALNVSVPPQDPLAIQEAVRYSLLAGGKRVRPLLCIAACELVGGDEATAMSAACAVEMIHTSSLIHDDLPCMDDADLRRGKPTNHKVFGEHMAVLAGDALLALAFEHMTVVSSGLVAPERMIRSVTELAKAIGTKGLVAGQVSDLCSQGLNPYDVGLERLEFIHLHKTAALLEAAAVLGAIIGGGTEEEIQKLRKYGRCIGLLFQVVDDIIDVTESTEELGKTAGKDVMARKLTYPRLIGLERSREVAEKLRREAAEQLLGFDSNKVAPLVALASYIACRHN

SEQ ID NO: 80 - protein, 292 aa, Chlamydia muridarum; identical to SEQ ID NO: 68

SEQ ID NO: 81 - protein, 252 aa, Arabidopsis thaliana
MAEIWLWEVGTWKAVGRLQSHSLTVTHLEFSYDDTLLLSVSRDRHFSVFSIQRTGNSSGFNFTVLNQIFSKHRKMSTFLASLTRLFFCFCSDNGEVSHKLMAKVEAHKRIIWACSWNPFGHQFATSSRDKTVKIWSVENDARIKQILVLPPFGSSVTAVAWTGLDRNEKSGCVAVGMESGLIELWNVKIIETEEGTTATAALALRLEPFMCHVSAVNRLAWRPTEKCESNQSLRWLTSCGDDNCVRVFNFKF

SEQ ID NO: 82 - protein, 262 aa, Aquifex aeolicus; identical to SEQ ID NO: 52

SEQ ID NO: 83 - protein, 288 aa, Rhodobacter sphaeroides; identical to SEQ ID NO: 39

SEQ ID NO: 84 - protein, 371 aa, Arabidopsis thaliana; identical to SEQ ID NO: 38

SEQ ID NO: 85 - protein, 369 aa, Capsicum annuum; identical to SEQ ID NO: 56

SEQ ID NO: 86 - DNA, 3165 bp, Saccharomyces cerevisiae
atgccgccgctattcaagggactgaaacagatggcaaagccaattgcctatgtttcaagattttcggcgaaacgaccaattcatataatacttttttctctaatcatatccgcattcgcttatctatccgtcattcagtattacttcaatggttggcaactagattcaaatagtgtttttgaaactgctccaaataaagactccaacactctatttcaagaatgttcccattactacagagattcctctctagatggttgggtatcaatcaccgcgcatgaagctagtgagttaccagccccacaccattactatctattaaacctgaacttcaatagtcctaatgaaactgactccattccagaactagctaacacggtttttgagaaagataatacaaaatatattctgcaagaagatctcagtgtttccaaagaaatttcttctactgatggaacgaaatggaggttaagaagtgacagaaaaagtcttttcgacgtaaagacgttagcatattctctctacgatgtattttcagaaaatgtaacccaagcagacccgtttgacgtccttattatggttactgcctacctaatgatgttctacaccatattcggcctcttcaatgacatgaggaagaccgggtcaaatttttggttgagcgcctctacagtggtcaattctgcatcatcacttttcttagcattgtatgtcacccaatgtattctaggcaaagaagtttccgcattaactctttttgaaggtttgcctttcattgtagttgttgttggtttcaagcacaaaatcaagattgcccagtatgccctggagaaatttgaaagagtcggtttatctaaaaggattactaccgatgaaatcgtttttgaatccgtgagcgaagagggtggtcgtttgattcaagaccatttgctttgtatttttgcctttatcggatgctctatgtatgctcaccaattgaagactttgacaaacttctgcatattatcagcatttatcctaatttttgaattgattttaactcctacattttattctgctatcttagcgcttagactggaaatgaatgttatccacagatctactattatcaagcaaacattagaagaagacggtgttgttccatctacagcaagaatcatttctaaagcagaaaagaaatccgtatcttctttcttaaatctcagtgtggttgtcattatcatgaaactctctgtcatactgttgtttgtcttcatcaacttttataactttggtgcaaattgggtcaatgatgccttcaattcattgtacttcgataaggaacgtgtttctctaccagattttattacctcgaatgcctctgaaaactttaaagagcaagctattgttagtgtcaccccattattatattacaaacccattaagtcctaccaacgcattgaggatatggttcttctattgcttcgtaatgtcagtgttgccattcgtgataggttcgtcagtaaattagttctttccgccttagtatgcagtgctgtcatcaatgtgtatttattgaatgctgctagaattcataccagttatactgcagaccaattggtgaaaactgaagtcaccaagaagtcttttactgctcctgtacaaaaggcttctacaccagttttaaccaataaaacagtcatttctggatcgaaagtcaaaagtttatcatctgcgcaatcgagctcatcaggaccttcatcatctagtgaggaagatgattcccgcgatattgaaagcttggataagaaaatacgtcctttagaagaattagaagcattattaagtagtggaaatacaaaacaattgaagaacaaagaggtcgctgccttggttattcacggtaagttacctttgtacgctttggagaaaaaattaggtgatactacgagagcggttgcggtacgtaggaaggctctttcaattttggcagaagctcctgtattagcatctgatcgtttaccatataaaaattatgactacgaccgcgtatttggcgcttgttgtgaaaatgttataggttacatgcctttgcccgttggtgttataggccccttggttatcgatggtacatcttatcatataccaatggcaactacagagggttgtttggtagcttctgccatgcgtggctgtaaggcaatcaatgctggcggtggtgcaacaactgttttaactaaggatggtatgacaagaggcccagtagtccgtttcccaactttgaaaagatctggtgcctgtaagatatggttagactcagaagagggacaaaacgcaattaaaaaagcttttaactctacatcaagatttgcacgtctgcaacatattcaaacttgtctagcaggagatttactcttcatgagatttagaacaactactggtgacgcaatgggtatgaatatgatttctaaaggtgtcgaatactcattaaagcaaatggtagaagagtatggctgggaagatatggaggttgtctccgtttctggtaactactgtaccgacaaaaaaccagctgccatcaactggatcgaaggtcgtggtaagagtgtcgtcgcagaagctactattcctggtgatgttgtcagaaaagtgttaaaaagtgatgtttccgcattggttgagttgaacattgctaagaatttggttggatctgcaatggctgggtctgttggtggatttaacgcacatgcagctaatttagtgacagctgttttcttggcattaggacaagatcctgcacaaaatgttgaaagttccaactgtataacattgatgaaagaagtggacggtgatttgagaatttccgtatccatgccatccatcgaagtaggtaccatcggtggtggtactgttctagaaccacaaggtgccatgttggacttattaggtgtaagaggcccgcatgctaccgctcctggtaccaacgcacgtcaattagcaagaatagttgcctgtgccgtcttggcaggtgaattatccttatgtgctgccctagcagccggccatttggttcaaagtcatatgacccacaacaggaaacctgctgaaccaacaaaacctaacaatttggacgccactgatataaatcgtttgaaagatgggtccgtcacctgcattaaatcctaa

SEQ ID NO: 87 - DNA, 4471 bp, Human
ttcggtggcctctagtgagatctggaggatccaaggattctgtagctacaatgttgtcaagactttttcgaatgcatggcctctttgtggcctcccatccctgggaagtcatagtggggacagtgacactgaccatctgcatgatgtccatgaacatgtttactggtaacaataagatctgtggttggaattatgaatgtccaaagtttgaagaggatgttttgagcagtgacattataattctgacaataacacgatgcatagccatcctgtatatttacttccagttccagaatttacgtcaacttggatcaaaatatattttgggtattgctggccttttcacaattttctcaagttttgtattcagtacagttgtcattcacttcttagacaaagaattgacaggcttgaatgaagctttgccctttttcctacttttgattgacctttccagagcaagcacattagcaaagtttgccctcagttccaactcacaggatgaagtaagggaaaatattgctcgtggaatggcaattttaggtcctacgtttaccctcgatgctcttgttgaatgtcttgtgattggagttggtaccatgtcaggggtacgtcagcttgaaattatgtgctgctttggctgcatgtcagttcttgccaactacttcgtgttcatgactttcttcccagcttgtgtgtccttggtattagagctttctcgggaaagccgcgagggtcgtccaatttggcagctcagccattttgcccgagttttagaagaagaagaaaataagccgaatcctgtaactcagagggtcaagatgattatgtctctaggcttggttcttgttcatgctcacagtcgctggatagctgatccttctcctcaaaacagtacagcagatacttctaaggtttcattaggactggatgaaaatgtgtccaagagaattgaaccaagtgtttccctctggcagttttatctctctaaaatgatcagcatggatattgaacaagttattaccctaagtttagctctccttctggctgtcaagtacatcttctttgaacaaacagagacagaatctacactctcattaaaaaaccctatcacatctcctgtagtgacacaaaagaaagtcccagacaattgttgtagacgtgaacctatgctggtcagaaataaccagaaatgtgattcagtagaggaagagacagggataaaccgagaaagaaaagttgaggttataaaacccttagtggctgaaacagataccccaaacagagctacatttgtggttggtaactcctccttactcgatacttcatcagtactggtgacacaggaacctgaaattgaacttcccagggaacctcggcctaatgaagaatgtctacagatacttgggaatgcagagaaaggtgcaaaattccttagtgatgctgagatcatccagttagtcaatgctaagcatatcccagcctacaagttggaaactctgatggaaactcatgagcgtggtgtatctattcgccgacagttactttccaagaagctttcagaaccttcttctctccagtacctaccttacagggattataattactccttggtgatgggagcttgttgtgagaatgttattggatatatgcccatccctgttggagtggcaggacccctttgcttagatgaaaaagaatttcaggttccaatggcaacaacagaaggttgtcttgtggccagcaccaatagaggctgcagagcaataggtcttggtggaggtgccagcagccgagtccttgcagatgggatgactcgtggcccagttgtgcgtcttccacgtgcttgtgactctgcagaagtgaaagcctggctcgaaacatctgaagggttcgcagtgataaaggaggcatttgacagcactagcagatttgcacgtctacagaaacttcatacaagtatagctggacgcaacctttatatccgtttccagtccaggtcaggggatgccatggggatgaacatgatttcaaagggtacagagaaagcactttcaaaacttcacgagtatttccctgaaatgcagattctagccgttagtggtaactattgtactgacaagaaacctgctgctataaattggatagagggaagaggaaaatctgttgtttgtgaagctgtcattccagccaaggttgtcagagaagtattaaagactaccacagaggctatgattgaggtcaacattaacaagaatttagtgggctctgccatggctgggagcataggaggctacaacgcccatgcagcaaacattgtcaccgccatctacattgcctgtggacaggatgcagcacagaatgttggtagttcaaactgtattactttaatggaagcaagtggtcccacaaatgaagatttatatatcagctgcaccatgccatctatagagataggaacggtgggtggtgggaccaacctactacctcagcaagcctgtttgcagatgctaggtgttcaaggagcatgcaaagataatcctggggaaaatgcccggcagcttgcccgaattgtgtgtgggaccgtaatggctggggaattgtcacttatggcagcattggcagcaggacatcttgtcaaaagtcacatgattcacaacaggtcgaagatcaatttacaagacctccaaggagcttgcaccaagaagacagcctgaatagcccgacagttctgaactggaacatgggcattgggttctaaaggactaacataaaatctgtgaattaaaaaagctcaatgcattgtcttgtggaggatgaataaatgtgatcactgagacagccacttggtttttggctctttcagagaggtctcaggttctttccatgcagactcctcagatctgaacacagtttagtgctttacatgctgtgctctttgaagagatttcaacaagaatattgtatgttaaagcatcagagatggtaatctacagctcacctctgaaagcaaatataagctgggaaaaaagttttgatgaaattcttgaagttcatggtgatcagtgcaattgaccttctccctcactcctgccagttgaaaatggatttttaaattatactgtagctgatgaaactcctgattttgtagttaatttattaagtctgggatgtagaacttcaagaagtaagagctaagttctaagttcatgtttgtaaattaatacttcatttggtgctggtctattttgattttggggggtaatcagcattattcttcagaaggggacctgttttcttcaagggaagaaacactcttattcccaaactacagaataatgtgttaaacatgctaaatagttctatcaggaaaacaaatcactgtatttatctccgcaggctatttgttcagagaggccttttgtttaaatataaatgtttaaatataaatgtttgtctggattggctataacatgtctttcagcattaggcttttaagaaacacagggttttgtattctttactaaagatatcagagctcttaatgttgcttagatgagggtgactgtcaagtacaagcaagactgggaccttagaaatcattgtagaaacacagttttgaaagatttttaccatgtctctaagccaactttaattgcttaaaagacatttttatttagttgaaaaatctagttttttttgtaaactgtaccaaatctgtatatgttgtaataaaacttatgctagtttattggaagtgttcaagaaataaaaatcaacttgtgtactgataaaatactctagcctgggccagagaagataatgttctttaatgttgtcaggaaaccctggcttgcttgccgagcctaatgaaagggaaagtcagctttcagagccagtgaaggagccacgtgaatggccctagaactgtgcctagttcctgtggccaggaggttggtgactgaaacattcacacagggctcttggatggacccacgaacgctcttagctttctcagggggtcagcagagttattgaatcttaattttttttaatgtacaagttttgtataaataataaagaactccttattttgtattacatctaatgcttaagtgttgctcttggaaagctgatgatgtctcttgtagagatgactctgaaaaacattccaggaaaccatggcagcatggagagcctcttagtgattgtgtctgcattgttattgtggaagatttaccttttctgttgtacgtaaagcttaaattacttttgttgtgactttttagccagtgactttttctgagcttttcatggaagtggcagtgaaaaatatgttgagtgttcaaaaaagtgactgtaattaatatcttgctggattaatgttttgtacaattactaaattgtatacattttgttatagaatacttttttctagtttcagtaaataatgaaaaggaagttaatacca

SEQ ID NO: 88 - DNA, 4768 bp, Mesocricetus auratus
tgtatgtcttgtctttctcctaaggggcgtaggctcattgataactcatgtcctcaccttgcactccttttggaattatttggtttgagtgaagaagaccggaccttcgaggttcgcaacttaaacaatagacttgtgaggatccagggaccgagtggctacaatgttgtcacgacttttccgtatgcatggcctctttgtggcctcccatccctgggaagttattgtggggacggtgacacttaccatctgtatgatgtccatgaacatgttcactggcaacaacaagatctgtggttggaattacgagtgcccaaaatttgaggaggatgtattgagcagtgacatcatcatcctcaccataacacggtgcatcgccatcctgtacatttacttccagttccagaacttacgtcagcttgggtcgaagtatattttaggtattgctggcctgttcacaattttctcaagttttgtctttagtacagtcgtcattcacttcttagacaaagaactgacgggcttaaatgaagctttgccctttttcctgcttttgattgacctttctagagcgagtgcactagcaaagtttgccctaagttcaaactctcaggatgaagtaagggaaaatatagctcgcggaatggcaattctgggccccacattcacccttgatgctcttgtggaatgtcttgtaattggagttggcaccatgtcaggggtgcgtcagcttgaaatcatgtgctgctttggctgcatgtctgtgcttgccaactacttcgtgttcatgacatttttcccagcgtgtgtgtccctggtccttgagctttctcgggaaagtcgagagggtcgtccaatttggcagcttagccattttgcccgagttttggaagaagaagagaataaaccaaaccctgtaacccaaagggtcaagatgattatgtctttaggtttggttcttgttcatgctcacagtcgatggatagctgatccttcccctcagaatagcacaacagaacattctaaagtctccttgggactggatgaagatgtgtccaagagaattgaaccaagtgtttctctctggcagttttatctctccaagatgatcagcatggacattgaacaagtggttaccctgagcttagcttttctgttggctgtcaagtacattttctttgaacaagcagagacagagtccacactgtctttaaaaaatcctatcacgtctcctgtcgtgaccccaaagaaagctccagacaactgttgtagacgggagcctctgcttgtgagaaggagcgagaagctttcatcggttgaggaggagcctggggtgagccaagatagaaaagttgaggttataaaaccattagtggtggaaactgagagtgcaagcagagctacatttgtgcttggcgcctctgggaccagccctccagtggcagcgaggacacaggagcttgaaattgaactccccagtgagcctcggcctaatgaagaatgtctgcagatactggagagtgccgagaaaggtgcaaagttccttagcgatgcagagatcatccagttggtcaatgccaagcacatcccagcctacaaattggaaaccttaatggaaactcatgaacgtggtgtatctattcgccggcagctcctctccacaaagcttccagagccttcttctctgcagtacctgccttacagagattataattattccctggtgatgggagcttgctgtgagaatgtgatcggatatatgcccatccctgtcggagtagcagggcctctgtgcctggatggtaaagagtaccaggttccaatggcaacaacggaaggctgtctggtggccagcaccaacagaggctgcagggcaataggtcttggtggaggtgccagcagccgggtccttgcagatgggatgacccggggcccagtggtgcgtcttcctcgtgcttgtgattctgcagaagtgaaggcctggcttgaaacacccgaagggtttgcggtgataaaggacgccttcgatagcactagcagatttgcacgtctacagaagcttcatgtgaccatggcagggcgcaacctgtacatccgtttccagtccaagacaggggatgccatggggatgaacatgatttccaagggcactgagaaagcacttctgaagcttcaggagttctttcctgaaatgcagattctggcagttagtggtaactactgcactgacaagaaacctgccgccataaactggatcgagggaagaggaaagacagttgtgtgtgaagctgttattccagccaaggtggtgagagaagtattaaagacaactacggaagctatgattgacgtaaacattaacaagaatcttgtgggttctgccatggctgggagcataggaggctacaatgcccatgcagcaaacatcgtcactgctatctacattgcatgtggccaggatgcagcacagaatgtggggagttcaaactgtattactttaatggaagcaagtggtcccacgaatgaagacttgtatatcagctgcaccatgccatctatagagataggaactgtgggtggtgggaccaacctcctaccacagcaggcctgtctgcagatgctaggtgttcaaggagcgtgcaaagacaatcctggagaaaatgcacggcaacttgcccgaattgtgtgtggtactgtaatggctggggagttgtccttgatggcagcattggcagcaggacatcttgttagaagtcacatggttcataacagatcgaagataaatttacaagatctgcaaggaacgtgcaccaagaagtcagcttgagcagcctgacagtattgaactgaaacacgggcattgggttctcaaggactaacatgaaatctgtgaattaaaaatctcaatgcagtgtcttgtggaagatgaatgaacgtgatcagtgagacgcctgcttggtttctggctctttcagagacgtctgaggtcctttgctcggagactcctcagatctggaaacagtgtggtccttcccatgctgtattctgaaaagatctcatatggatgttgtgctctgagcaccacagatgtgatctgcagctcgtttctgaaatgatggagttcatggtgatcagtgtgagactggcctctcccagcaggttaaaaatggagttttaaattatactgtagctgacagtacttctgattttatatttatttagtctgagttgtagaactttgcaatctaagtttattttttgtaacctaataattcatttggtgctggtctattgatttttgggggtaaacaatattattcttcagaaggggacctacttcttcatgggaagaattacttttattctcaaactacagaacaatgtgctaagcagtgctaaattgttctcatgaagaaaacagtcactgcatttatctctgtaggccttttttcagagaggccttgtctagatttttgccagctaggctactgcatgtcttagtgtcaggccttaggaaagtgccacgctctgcactaaagatatcagagctcttggtgttacttagacaagagtatgagcaagtcggacctctcagagtgtgggaacacagttttgaaagaaaaaccatttctctaagccaattttctttaaagacattttaacttatttagctgagttctagatttttcgggtaaactatcaaatctgtatatgttgtaataaagtgtcttatgctaggagtttattcaaagtgtttaagtaataaaaggactcaaatttacactgataaaatactctagcttgggccagagaagacagtgctcattagcgttgtccaggaaaccctgcttgcttgccaagcctaatgaagggaaagtcagctttcagagccaatgatggaggccacatgaatggccctggagctgtgtgccttgttctgtggccaggagcttggtgactgaatcatttacgggctcctttgatggacccataaaagctcttagcttcctcagggggtcagcagagttgttgaatcttaattttttttttaatgtaccagttttgtataaataataataaagagctccttattttgtattctatctaatgcttcgagttcagtcttgggaagctgacatctcatgtagaagatggactctgaaagacattccaagagtgcagcggcatcatgggagcctcttagtgattgtgtgtcagtattattgtggaagattgactttgcttttgtatgtgaagtttcagattgctcctcttgtgactttttagccagtaacattttatttacctgagcttgtcatggaagtggcagtgaaaagtattgagtattcatgctggtgactgtaaccaatgtcatcttgctaaaaactcatgttttgtacaattactaaattgtatacattttgttatagaatactttttccagttgagtaaattatgaaaggaagttaacattaacaggtgtaagcggtggcttttttaaaatgaaggattaaccctaagcccgagacccagaagctagcaaagtctggcagagtggtaaactgtcctgctggggccatccaatcatctctctccattacactttctaactttgcagcattggtgctggccagtgtattgtttcattgatcttccttacgcttagagggtttgattggttcagatctataatctcagccacattgtcttggtatcagctggagagagttaagaggaagggaaaataaagttcagatagccaaaacac

SEQ ID NO: 89 - DNA, 2395 bp, Human
aataagcatgtttaagcttatgcttagataagaaagtagatgaagagagcaaatgaatgttcatctactgagttaagggtactgccagtcaggctgtgaatattatgttagctatggtattatgcactgtcaggtgtggctgtcaagtcttggaaagttagtgcttccagtggagtctagttctattctgatgccattacagttgccctgtttttagttgatttagtaagaaattggtcatgattttaagggtgaatcttgttgtgtctctccctggctacagatgctaggtgttcaaggagcatgcaaagataatcctggggaaaatgcccggcagcttgcccgaattgtgtgtgggaccgtaatggctggggaattgtcacttatggcagcattggcagcaggacatcttgtcaaaagtcacatgattcacaacaggtaagactcaaagatatatttaacatgttccccctatacttcaaaaaatatgcagtgtaaaaacttactattcatctactgtagttccaagttaaaattctacactcctgatatttatatattgctactttgtcattttctaccataggtcgaagatcaatttacaagacctccaaggagcttgcaccaagaagacagcctgaatagcccgacagttctgaactggaacatgggcattgggttctaaaggactaacataaaatctgtgaattaaaaaagctcaatgcattgtcttgtggaggatgaataaatgtgatcactgagacagccacttggtttttggctctttcagagaggtctcaggttctttccatgcagactcctcagatctgaacacagtttagtgctttacatgctgtgctctttgaagagatttcaacaagaatattgtatgttaaagcatcagagatggtaatctacagctcacctctgaaagcaaatataagctgggaaaaaagttttgatgaaattcttgaagttcatggtgatcagtgcaattgaccttctccctcactcctgccagttgaaaatggatttttaaattatactgtagctgatgaaactcctgattttgtagttaatttattaagtctgggatgtagaacttcaagaagtaagagctaagttctaagttcatgtttgtaaattaatacttcatttggtgctggtctattttgattttggggggtaatcagcattattcttcagaaggggacctgttttcttcaagggaagaaacactcttattcccaaactacagaataatgtgttaaacatgctaaatagttctatcaggaaaacaaatcactgtatttatctccgcaggctatttgttcagagaggccttttgtttaaatataaatgtttaaatataaatgtttgtctggattggctataacatgtctttcagcattaggcttttaagaaacacagggttttgtattctttactaaagatatcagagctcttaatgttgcttagatgagggtgactgtcaagtacaagcaagactgggaccttagaaatcattgtagaaacacagttttgaaagatttttaccatgtctctaagccaactttaattgcttaaaagacatttttatttagttgaaaaatctagttttttttgtaaactgtaccaaatctgtatatgttgtaataaaacttatgctagtttattggaagtgttcaagaaataaaaatcaacttgtgtactgataaaatactctagcctgggccagagaagataatgttctttaatgttgtcaggaaaccctggcttgcttgccgagcctaatgaaagggaaagtcagctttcagagccagtgaaggagccacgtgaatggccctagaactgtgcctagttcctgtggccaggaggttggtgactgaaacattcacacagggctcttggatggacccacgaacgctcttagctttctcagggggtcagcagagttattgaatcttaattttttttaatgtacaagttttgtataaataataaagaactccttattttgtattacatctaatgcttaagtgttgctcttggaaagctgatgatgtctcttgtagagatgactctgaaaaacattccaggaaaccatggcagcatggagagcctcttagtgattgtgtctgcattgttattgtggaagatttaccttttctgttgtacgtaaagcttaaattacttttgttgtgactttttagccagtgactttttctgagcttttcatggaagtggcagtgaaaaatatgttgagtgttcaaaaaagtgactgtaattaatatcttgctggattaatgttttgtacaattactaaattgtatacattttgttatagaatacttttttctagtttcagtaaataatgaaaaggaagttaatacca

SEQ ID NO: 90 - DNA, 898 bp, Human
ttttaaataaagttaaatatatgggcagtgttttccatcaaagatgactgttgtaccttgcccatctgtctgtgtgtatcatccataggaacaaactttactgattttttttaattttttttattttttaatggaggacagggcttaaatggggccacatctaaactttgttttctggaggttcagaaagatagatttgggtaacattcccctgaaccttctggaggaacatctaaatgtacacagctctgttttgtaggtattaaagactaccacagaggctatgattgaggtcaacattaacaagaatttagtgggctctgccatggctgggagcataggaggctacaacgcccatgcagcaaacattgtcaccgccatctacattgcctgtggacaggtgagctctccagcctccacttctcttgtgttacgtctttctaagtgaaagaagtatattgtatattttttcttttcttgtttccaggatgcagcacagaatgttggtagttcaaactgtattactttaatggaagcaagtggtcccacaaatgaagatttatatatcagctgcaccatgccatctatagagataggaacggtgggtggtgggaccaacctactacctcagcaagcctgtttgcaggtatgatgtatcaggcatagagtccacaagcctagttctgactctctgggtttctctttctatctgagactatgtatcactcacctctattttaattggtcttttccaaactcttttgtcatatcagcctaatccattgtgtccaaataagcatgtttaagcttatgcttagataagaaagtagatgaagagagcaaatgaatgttcatctactgagttaagggtactgccagtccaggctgtgaatattat

SEQ ID NO: 91 - DNA, 666 bp, Human
ttttatctacatctttttcaacaatgactacaaagaacttggttttcataccgagaaagaaacacattaggaatttatacctgaccaagaaagtaattgtgatggttaacaaaacagctgttacttttgtgctcagtttctttgaagtatagttattatacttagaaatatatcatagatacaaattcttctcataaggatgaaggatgaatatttcatgcagtttaatatgtgtgtgttttgggttcttgttaacagggtacagagaaagcactttcaaaacttcacgagtatttccctgaaatgcagattctagccgttagtggtaactattgtactgacaagaaacctgctgctataaattggatagagggaagaggaaaatctgttgtttgtgaagctgtcattccagccaaggttgtcagagaagtgagtgactggatggataatttatcttttttattttgtaatctttaattgtatttaaaaatgggggaaaggagtattaacattttaaataaagttaaatatatgggacagtgttttccatcaaagatgactgttgtaccttgcccatctgtctgtgtgtatcatccataggaacaaactttactgattttttttaattttttttattttttaatggaggacagggcttaaatgggg

SEQ ID NO: 92 - DNA, 862 bp, Human
  misc_feature (1)..(862): n equals unknown
tttgtttttatgtgacctgtgtaagtttattaagaaataattgtgctgggcgcagtggctcacgcctgtaatcccaacactttggggaggccaacgcgggcagatcacttgaggccaggagttcgagaccagcctggccagcatggcgaaaccctgtctctactcaaaatacaaaaattggctgggcatggtggcccgcgcctgtaatcccagctactcgggaggctgaggctggagaatttcttgaacccgggaggtggatgttgcagtgagccaagatcaagccactgcactccagcctgggccacagagtgagactccgtctcaaaaaaaaacaaaaaacaaagaaataataataataaaagaataaaacacagtctttgcatcttttatttatagatttgcacgtctacagaaacttcatacaagtatagctggacgcaacctttatatccgtttccagtccaggtcaggggatgccatggggatgaacatgatttcaaaggtaagtgtaggcagantatctgaaagtacttttattaaaatgaaagtacttttataaaaaacaaatcaggcatttgttgattggtattccttacatttgatagatttaatttagacttggcattacacatatcctgagtttacttaggactgggaacaatcttagtattgacatttcaaaactttatccagtcaagagaccacctttgaagctgacctcttcaagatttgtctttaagaacaccaatataatttcagtactttgggaggccaaggcaagaagattgcttggggtctggagtttaagaccagcctggcaacacagtgagatgctatctctacaaacaataaaaaaaaa

SEQ ID NO: 93 - DNA, 954 bp, Human
tatcctaattttttattctgccttatgatgtaggtcatagaaattaaaaatatatttcctgcttttatagtcattactcaaagattttagtattttaaacactttttaaaggtgaattaaacattttgtttaaaaagaatacatactaaaggattaagtttgaagatagttatactgacaagctgagataaaattttgtgcatttactatatagattttcatttggtgcctgactttaccttttaggtgatgggagcttgttgtgagaatgttattggatatatgcccatccctgttggagtggcaggacccctttgcttagatgaaaaagaatttcaggttccaatggcaacaacagaaggttgtcttgtggccagcaccaatagaggctgcagagcaataggtgtaagttggcatttatatatttgccagtttaaaaatacatcataagtaaggcaatgagaagagttttaaggacaattagtgataccttttgggtcaagcatgagcatttttgggtaacatgtgcttgcttctctaacatatactgtgtagcttggtggaggtgccagcagccgagtccttgcagatgggatgactcgtggcccagttgtgcgtcttccacgtgcttgtgactctgcagaagtgaaagcctggctcgaaacatctgaagggttcgcagtgataaaggaggcatttgacagcactagcaggtgtgtgagtggatttgtatgtacagttatatctatttgtttattttagaaccagtgtcattttctgtgattaccaaacataattgttaacatattacctgctaaagagcacataacagaatatcaactttaaagccattcatttaaaatgagtaatatttatgcttggttggggggaaaaaaagaatgttgattcaaatgaatagctccacagaggtaaattagtaagaaaaaaaaaaaa

SEQ ID NO: 94 - DNA, 688 bp, Human
  misc_feature (1)..(688): n equals unknown
attagtgcaagcctgtctttgtattgtaaaatctaatgatacggtatttatattatttttgtttggcattttttgcattaaatgaattattttgcagaggtatcttttaattaaaaactacagtgatttaatttaaaaattacattattttagcttagcattgtttgtattaaatggtttataacatgaaatacagtccttcaagtcttctgtttcatctctctctctgaccacaatttcattttttttctccatttctttagaaaggtgcaaaattccttagtgatgctgagatcatccagttagtcaatgctaagcatatcccagcctacaagttggaaactctgatggaaactcatgagcgtggtgtatctattcgccgacagttactttccaagaagctttcagaaccttcttctctccagtacctaccttacagggattataattactccttggtatgttattttctcgattaagagagatttgctttgtatgtttttaatcttttttcttgattagtttcatatatgtacatagttttataaaacattttccttttaaatcattttatcctaattttttattctgcttatgatgnagggcataagaaattaaaaatatatttcctgcttttatagtcattactcaaagattttaagtattttaaacactttttaaaggtgaa

SEQ ID NO: 95 - DNA, 1455 bp, Human
  misc_feature (1)..(1455): n equals unknown
tttttttcttaatgtgttcatttctttgaggctcctggtctttattagcccctctctcctaaacagactttttaagttcccccnccttatctctcgttgaaagcctgttctttggggtgttttcagtagttcagtggggtcnctactttagttagttgcatagcaagcttggggctttttttttttcatggtaaggggaagctatgagagataatgtctggctgtccagttgctagggataagaaatttaagttctattgatatgcagaggatacattactttaaaaattttatttcagtctctaggcttggttcttgttcatgctcacagtcgctggatagctgatccttctcctcaaaacagtacagcagatacttctaaggtttcattaggactggatgaaaatgtgtccaagagaattgaaccaagtgtttccctctggcagttttatctctctaagtaagttaattgaaatctactttgtgatatattaatcataacactctatgctaatgtaagtttagattgtgtcctttacatttctgaataagattttaatttgctttcttttatttagaatgatcagcatggatattgaacaagttattaccctaagtttagctctccttctggctgtcaagtacatcttctttgaacaaacagagacagaatctacactctcattaaaaaaccctatcacatctcctgtagtgacacaaaagaaagtcccagacaattgttgtagacgtgaacctatgctggtcagaaataaccagaaatgtgattcagtagaggaagagacagggataaaccgagaaagaaaaggtaacttgttattctcttcgctttcaatccttcattgctttgtcaaaaagtagtctgttttcaaaattatgtgccgtgttgtgagatttcttttgatttcttgaacagttgaggttataaaacccttagtggctgaaacagataccccaaacagagctacatttgtggttggtaactcctccttactcgatacttcatcagtactggtgacacaggaacctgaaattgaacttcccagggaacctcggcctaatgaagaatgtctacagatacttgggaatgcagaggtgaggatgataacataaactccaatgtggcatttttcattacaaaggagctttttcaaggaagaaaaatctagtatctgctgaacactacagctaagttctgggcacggtgtaacatgactaacagatactatcttctttctttatttcacacaaccttgagaggtaggtacaattatctatttttcagatgagaacattgaggctccaatatgtttaatttcccaaagtagtacctctaggaaatgataaagctgatagcagggtccaaagattttctgactccagagtcaaaactctttctagtttattactgnttatcatagagatgagtgactactg

SEQ ID NO: 96 - DNA, 1031 bp, Human
  misc_feature (1)..(1031): n equals unknown
ggggttttgctctgttagagtagcctgtcctctccttatttaataataaggcactactgcttgacaaaaaggaattggaaacacatatgttttatcaattgtgtattaaacactaccattctgcctggcattgtgatatggggacatgagagaaggcaagagctttgctcttgagggacttagagttctgttgttattcctgctgtttcctaaggcttggcatcacctctaagttgctaattctatttccagtaagtggcaaggagcttaatgtactaatattttcatgttttgtccacctgcaggaagacaaatatatccttgtgatatatgcagcataaaaaataacgtagacttnactagttgtatctttaatttttctctaaccaggggtacgtcagcttgaaattatgtgctgctttggctgcatgtcagttcttgccaactacttcgtgttcatgactttcttcccagcttgtgtgtccttggtattagaggtaagaccaattcttacatatggcactagtagaagagtaagatttctgcttacacagtttacctaaacagaatcaataccttctaatgtcacactgacttaatttgtagctttctcgggaaagccgcgagggtcgtccaatttggcagctcagccattttgcccgagttttagaagaagaagaaaataagccgaatcctgtaactcagagggtcaagatgattatggtaatgacatggttttcttcttcttttagtatcctcagttccaatctcattatttttaagatttctttttttctacaattttggcccattcaatgatattgcacccccttcttcctttttttcttaatgtgttcatttctttgaggctcctggtctttattagcccctctctcctaaacagactttttaagttcccccaccttatctctcgttgaaagcctgttctttggggtgttttcagtagttcagtggggtcactactttagttagttgcatagcaagcttggggctttttttttttcatggta

SEQ ID NO: 97 - DNA, 610 bp, Human
acaccattgcacattgcactccagcctgggaaacaaagtgagactacatctcaaaaaaaaattttttaaaatcctttatattacaatcatactttgtatcttgaatacctgttagttttatcatattgtatattttactctttgaatagtaatttgatattaatataagccataggatgctctaacatttaaaaaagttgttctgtcccttgccttcattgatatgtttgatctgttttaggatgaagtaagggaaaatattgctcgtggaatggcaattttaggtcctacgtttaccctcgatgctcttgttgaatgtcttgtgattggagttggtaccatgtcaggtttgtaagcaatttttgccatattttaaaataggtatgtccgctaaagaggaaaaagaacatcttggatttgtattatttattgttaaattctgacttttaaattactcttaaaattttttattatattagtgtgtgggtatatctggcctgtttgctttggtggaaacttagcagcaggttactgatttatttttcactcctgccatcctctctttgtgttccactttgtgatatttttattcatttgatttcttttgttt

SEQ ID NO: 98 - DNA, 888 bp, Human
  misc_feature (1)..(888): n equals unknown
tttaagagctttttagtgctattattgccaatttagtttacagaaagtttgtttagtttatccttccacaggtagtgatcaatgaaaatttttatatattccactttttttccctaatggtaatccaaggagatattttttactaaggatgatactttgatacaaaattatcaaaaggtgtttaaatgtaaatatacttacattttaacattaaaaatatttttaacaaatattttgagcaactactatgtttagctttgaggatgccaaagaaatatagggtatacttttttgtctgcagaaaggtacacatactacaggatcatacagtatggagggggaaaggttttgttctaaaaagaatttttttaaaatcatactttttcccgttaaatttatctgatcattttgttcttttccagtgaagctttgccctttttcctacttttgattgacctttccagagcaagcacattagcaaagtttgccctcagttccaactcacaggtaagtattatttataagataggaatgtgaatagtattccttttttcagtttacattaataggaaggattaatagcgtttcttcatagcacaagatttaagaattgcccaaagttttaagtttaattctcaagtcccaagactggtctccataagtgccccaggaacagtcccctgtatctaacaactcaattatgattctgtagctactggaatttggaattgcccccatttttctttttgaaagttttcagaacttatggnaataataatttttgggtaaataagagtattttcctagtgaaacacatcagagagcagaacaagatctaatggaagagaaacccagggtagattgattgattgattgatttgagatgta

SEQ ID NO: 99 - DNA, 1162 bp, Human
  misc_feature (1)..(1162): n equals unknown
aaaaaaaattaaaaaattagctgggtgtggtagcatgtacctgtagtcctgctactcgggaggccatggcaggaggatcccttgaacctggaggttgaggctgcagtgaactgtgattgcnccnctgtactntagcctgggtaacagcatgttaccctgtntcaaaaaaaaaaaaattgtggtgatgtattggcttaccacagtggtttgattaaaagttggatttaatttttgatttgtaggtttgatatttttattggacttgtattgtgcttacatttatgttctcatgactatataaatgaattacacatgcaaaataaaaattcttagttttgattacttattttaaaagtcaaagctaatggaatttccttttctttctctcctattaggatgttttgagcagtgacattataattctgacaataacacgatgcatagccatcctgtatatttacttccagttccagaatttacgtcaacttggatcaaaatatattttgggtaataagttttacatatttaacttctggtgtcatcagatttttgatttgctgtggaaataaacctgttcattcaaatcatgtatttggaaatatgtgtattgctgaaagtgtgctgcatgcattgaatagtttccttattattggcaattagacattctgaaatttgagaccttaataatttggagtaaactagtattatctcagaatgctgtgtgacactgttattatttgtgtagtaaaggataaagtttttttagtattgaacttttgcattttaggtattgctggccttttcacaattttctcaagttttgtattcagtacagttgtcattcacttcttagacaaagaattgacaggcttgaagtaagtatttaaaacctaaatatactttctgtcaaaatacattttaaaaaacttttcttccccatgctgtaaaggtacattttcaaaagttaagaaaataaggggaaatttttttgtataattttactattagctaattttaataactattaacattttggcatatatccttttctactgtttttatacttaaagaaaatatctgatatcatatatattgttttataatttctttatgcttaataatagtttatcaacatctttccatgtccctttttttttttttt

SEQ ID NO: 100 - DNA, 692 bp, Human
  misc_feature (1)..(692): n equals unknown
ttaaaatcttttcctaaaaatacaatgagctgtatactaagtgttcacccttgatattccttccaggatccaaggattctgtagctacaatgttgtcaagactttttcgaatgcatggcctctttgtggcctcccatccctgggaagtcatagtggggacagtgacactgaccatctgcatgatgtccatgaacatgtttactggtaacaataagatctgtggttggaattatgaatgtccaaagtttgaagaggttagtgaagttaatttgatactgactaaagtaaattacattttcaatttttgaagagcccttaagcccctatagggagcacataatttttaaaagttagagtaaaatatttattttagtattttggaacttacctcaaatttctgcttacatggaatgcactggaaatgctcttattttgctttgtctttacaaatgaatgtaattgactttatttgagaaatacatcttttataagtgactaatagtcaaaaatgattgtgggccgggtatagtgactcatgcctgtaatcccagcactttgggaggccaaagcaggagaattgtttgagcctaggagttcaagaccagcctgggcaacctggacaacatagtaagacccagtctttaaaaaaaaattaaaggccgggcacggnggctcatgctgtaatcccacac

SEQ ID NO: 101 - DNA, 2694 bp, Streptococcus pneumoniae
gagcttataaagctacttatatcggtgaactctctagcaactaatcattctttaaaatgatgaccaataagaggcttgatttggtgaatcaagtcttttttctctcttttactgccatttgtgataaaatagtatagaacgattttttacatgaatgataaaacagaggtaaatatgacaatcggtattgataagattggttttgcgaccagtcaatatgtcttgaaattacaagacttagcagaagcgaggggaattgaccctgaaaaattaagtaaaggactcttactcaaggaattgagtattgcgcccctaactgaggacatcgtgaccttggcggccagtgctagtgactctattttaactgagcaagaaagacaagaagttgacatggtcattgtggctaccgagtcaggaattgaccagagtaaggctgcggccgtctttgtgcatggcttgctgggcatccagccctttgctcgtagtttcgagattaaagaagcctgctacggagcgactgctgccctccattatgccaaattgcatgtggaaaattctccggagtccaaggtcttggtcattgccagtgatattgccaaatacggtattgaaactccaggagaaccaactcaaggtgctggaagtgtagctatgttgattacacaaaatccacgcatgatggcctttaataatgacaatgtagctcagacccgtgacatcatggatttctggcgaccaaattactcgacaactccctatgtaaatggtgtctattctacccaacaatacttggatagtttgaaaacgacttggcttgaatatcaaaaacgctaccagcttactttggatgattttgcggctgtttgtttccacttgccttatcctaaattagcgctaaaaggcttgaaaaaaatcatggataagaacttgcctcaagagaaaaaagacctcttgcaaaagcattttgaccagtctattctctacagtcaaaaggtggggaatatctacacaggttcacttttccttggacttttgtctctcttggaaaatacagatagcttgaaagctggggataaaatcgccctttatagttacggaagtggagctgtggctgagttcttcagtggtgaattggttgaaggatatgaagcttatttggataaagaccgtttgaacaagctcaaccaacgaactgccctatccgttgcagactatgaaaaggtcttttttgaggaagtaaacttggatgaaactaactctgcccagtttgctggctatgaaaatcaagattttgccttggttgaaattctcgaccaccaacgccgttatagcaaggttgaaaaataatgaagataagttggaatggattttctaaaaaatcataccaagagcgcctcgagctgttaaaagctcaggcgctccttagtcctgagagacaagctagtctggagaaggatgaacagatgagcgtgactgtggcagaccagctgagtgagaatgtagtgggaactttttctctgccttattcactggttccggaggtacttgtcaacggtcagggatacaccgttccctatgtgacagaagaaccttctgtggttgcggcggccagctatgccagcaaaatcatcaagcgtgcaggtggttttactgcacaagtccatcagcgacagatgattgggcaggtagccctttatcaagttgctaatcctaaactagcgcaagagaagattgccagcaagaaagcggagctcttggagcttgccaatcaagcctatccttctatcgttaaacgtggaggtggggcgcgtgatctgcatgtcgagcagataaaaggcgaaccagactttctcgttgtttatattcatgtcgatacccaggaagccatgggtgccaatatgctcaacaccatgctggaagccttgaaaccagtcttagaagaactcagtcagggacagagtctcatgggaatcctgtccaactacgcgaccgattctctggtgactgcaagctgtcgcatcgcctttcgctacttgagccgccaaaaggatcaaggacgagagattgcggagaaaattgcgttggctagtcagtttgcgcaggctgatccttaccgagctgctactcataataaaggaatttttaatggtattgatgcgattttgattgccactggaaatgactggcgtgccatcgaagctggggcccatgcctttgccagtcgagatggacgctatcaaggtcttagctgctggacgctggaccttgaaagagaagaattggtcggtgagatgaccctgcccatgcctgtagcgactaagggtggctctatcggcctcaacccacgtgtagctctcagtcatgatctactaggaaatccttctgccagagaattagcccagattatcgtgtccatcggtcttgctcaaaattttgcagccctcaaagccttggtaagtacgggcatccagcaaggccacatgaaactacaggccaaatccctagctctcctagctggggctagtgaatctgaagttgctcccctagtagagcgcctcatctcagataaaacctttaacctagagacagcccagcgctatctcgaaaatttaagatcataaaaactcagacgaatcggtctgagttttcttgtgtttaaatactttttcctggtaatagcgtaactggtaagaa

SEQ ID NO: 102 - DNA, 2799 bp, Streptococcus pyogenes
atccttcgtttataattttttgaatattagctttaaaaatctggtcagcttttgtcatctctaataacctttctgtaagcatacttcatactattctaactaattttaccaaaaaataccagaataaataaacattcgaaaaacttcatgtggtcatgaacattttaactattaaaggataaaacaaataactttatcagtctaattttgcagtaaaatgtgataaaatgggtaagactataaaaataactaaaagaaggacaaatatgacaattggaattgataagattggttttgcaaccagtcaatatgtcttgaaattggaagatttagcgcttgcacgccaagtggatccagcaaaatttagtcaagggctactcattgaatcttttagtgtggcaccaatcactgaagacattattactttagctgcttctgcagcagatcaaatcttaaccgacgaagatcgagctaagattgatatggttattttggcaactgaatcgagtactgatcagtcaaaggcatcagctatctatgtacatcacttagttggtatccagccttttgcacgttcctttgaagtaaaacaagcctgctatagcgcaactgctgctctagactatgctaaactgcatgtggcttctaagccagattctcgtgtccttgttattgctagtgatattgctagatacggtgtaggatctcctggcgaatcaactcaaggatctggtagtattgctcttttggtaactgctgaccctcgtattcttgctctaaatgaagataatgtggctcaaactagggatattatggacttttggaggcctaactatagtttcacaccttatgttgatggtatttactctaccaagcaatatctcaattgcttagaaaccacgtggcaagcttatcagaaaagagaaaaccttcagttatctgattttgctgcagtttgtttccatattccatttcccaagttagccctaaaaggtctaaataacattatggataacacagtacctcctgaacacagggaaaaactaatagaagcctttcaagcttctattacttatagcaaacaaattggaaatatttatactggctcactttatctaggattgttatctttacttgaaaatagtaaagtattacaatctggagataaaattggtttttttagctatggttccggtgccgtaagtgaattttattccggtcagttagttgctgggtacgataaaatgttaatgactaatcgacaagctttactagatcaacgaacacgtctttccgtttctaaatacgaagaccttttctacgaacaagtccaattagatgataatggtaatgccaattttgacatttacttaactggaaaatttgctctaacagccatcaaggagcatcaaaggatctatcataccaatgacaaaaactaatcttaactggagcggtttttcaaagaaaacattcgaagaacgcctccaacttatcgaaaaatttaaactacttaatgctgaaaacttaaatcaactcaaaacagacgttcttttgcctatccaaacagctaatcaaatgactgaaaatgtcttaggacgattggctttgccctttagcatagctcctgattttcttgtcaacggttcaacttatcagatgccttttgtcacggaagaaccttctgttgttgctgcagcatctttcgcagcaaaactaatcaaacgctcaggtggttttaaagctcaaaccctaaaccgacaaatgattggtcaaattgttctttacgatatcgaccaaatagataacgctaaagccgccatccttcataaaacaaaaaagctaattgcattggcaaataaagcttatccttccattgttaaaagaggtggaggcgctagaaccattcatttggaagaaaaaggagaatttttgattttctatctgactgttgatacccaagaagctatgggagcaaatatggtcaatactatgatggaagctcttgttcctgatttaacaagactgtctaaggggcattgtctaatggcgattttatctaattacgcaacagagtcgcttgttactactagttgtgagattcccgtgcgccttttagatcgcgataaaacaaaatccctacagttagctcaaaaaatagagctagccagccgactagctcaagtagatccttaccgggctactactcataataaaggtatttttaatggtattgatgcagtggtaatagccacaggaaatgactggcgtgctattgaagcaggggcccatgcttatgcctcaagaaatggtagctatcaaggacttagtcagtggcattttgaccaagataaacaagttctgcttggccaaatgaccctccctatgcctattgctagtaaggggggatctatcgggcttaaccctactgtttctatcgcacatgatcttcttaatcaacctgatgccaaaacattagcccaattgattgcatctgtggggttagctcaaaactttgctgcactaaaagctctgacctcatctggcatccaagctggtcacatgaaactacatgcgaaatcattagctcttttggcgggggcaacccaagacgaaattgctcctttagttaatgctttactagctgataaaccaataaatctagaaaaagcacatttttacttatcccagctaagacagtcttagatttaaacaactaatataaggcaaacacccatgtaaacaattggtttacatgggtgtttaatctttgtttctatacatacaagtcttagaaat

SEQ ID NO: 103 - DNA, 2869 bp, Staphylococcus epidermidis
taaaaacagctatatgacgttgtttttagggggcaagtatgaatagtaaattcgtttctttcattttaaaaaattaaaaaagcaaaagaattgagtttagattattctgctatatgatattcacgaatattgttatcaatagattttaaatagaaaatgtcacgatctgcatttgatttttcaagttcatgattcaattctaattggtcaaagcgtttgaagaaatgttcatattcatcaacagaaacctctattctattatttaataaagatttgtggcgctcaacatctaattgctccttgaatccatctactaatgttccactaaagaactcgcctacagaaccagaaccataactaaagagaccaatcgtttgtccgccttttaaatcacgtgtttctaataaagagatgagacttaaatataaggaccctgtgtaaatattaccgacataacgattataatcaactgcatcttggtaactagagttaagacggtcttgtgtagtttcatcggcatgattaataatagaatctaaagctttttgtcccattttggtgaatggtacatggaaacatagtgaagcgaaatcagcgagtgttttattatggcgacgtgcatattcattccaactttcttggaatgacttgatataggcatctttcgacaatgcaccagcaactaagggatattgatgacccgttggacgccagaaatcataaacgtcttcagtatatgctacggcatcatcattaagttttaaaatacttgggtcatgtgaaatcatcattgcaactgcaccggcaccttgagtaggctcaccaccagaatgaataccataacgagctgtgtcactagcaatgacaagaaccttttcgttagggcgttgagcaagataatctttggcaagttgaattgcaggtgttgctgcataacaagcctctttcatttcaaagcatcttgcaaagggttgaatacctaaaagatggtgaatttgaacggctgctgctttggcattatcaatcgcagactcagttgctactataaccataccaatattctttttatcttcttctgttataatatctttagcagcattggctcccatagatacgatatcttgattcactgggctcacagtcatttcagtttgaccaattccaattaaaaatttattaggatcgacttggcgcgcttctgcaagtttagccatgtctacataatatttgggtacatagaaacttattttatctatacctatattcataaggtgtgacatcctttcattttttgaagtagcactagtatcataccaaagaaaattcgttttatacaatgaaatataacagacatgaccaggaatatataataaatatgtaagcgctttacaaaaattgtgaaaagttttgaattatttgagtgcaagacaatgttagcagttgatatttaaagcgaaagttaaaaggttacattactacagtaatataaagatattttaaaggagtacataaatgaaaagtttagataaaggatttagacatttaacacgaaaagataaattaaaaaaacttgttgaatacggttggctagatgatgaaaactatgaaatattacttaatcatccgttaattaatgaggaagtcgcaaacagtttaattgaaaatgtcattggtcaaggtgcactaccagtagggttattacctcgaattatagttgatgataaagaatatgtagtacctatgatggtagaggaaccttctgtcgtagcagcagcaagttatggcgcaaaactcgttaatcaaagtggtggatttaagacaatttcaagtgaacgtctaatgattggacaaattgtctttgatgatgttgaagacacaggcacattagctaactcaatatatcaaatagaatcacaaattcatcaaatcgctgatgaagcttacccttctattaaagcaagaggtggaggatatcaacgtattgaaatagatacattccctaatcatcgattattatctttgaaggtttttgttgatactaaagatgctatgggtgctaatatgttaattacaatattagaagcaatcactgcacatctaaaagttaaaattttcaatcaaaatgttttaatgagtattttatctaatcatgcgacagcatcagtagtacaggtacaaggggaaatagatattgaagatttacatagaggagagagaagtggcgaagaggtagcacaacgtatggaacgagcgtcagttcttgcacaagtagatatacatcgtgctgcaacacataacaaaggtgtgatgaatggtatacacgctgtagtattggctacaggcaatgatacaagaggagttgaagcaagtgctcatgcatatgcaagcaaagatggtcattatagagggatagctacttgggaatatgatcgctcacgtaataaattggttggaactattgaagttcctatgactttagcgacagtaggtggaggtacgaaagttttacctattgctaaagcctcattaaatttgcttaatgttgaaaatgcacaggaactagggcaagttgttgctgctgttggattagcacaaaatttctctgcatgtagagcgctagtgtctgaggggatacaacaaggacatatgagtttacaatataaatcattagcgattgttgtaggtgcaaaaggcgaagaaattgcgcaagtagctgaagcgctcaaatatgaatcacaagctaatactgccaaagctcaagaaatcttgatgaatataagaaagtcataattaaaaagccgtcaaacgggtatatcttgatatatagcttcaaggatatacttatttgacggtttgtttgatttgatta

SEQ ID NO: 104 - DNA, 4088 bp, Staphylococcus haemolyticus
gtttacacgtaaataaagaggcgttcgagataagagcctaaattgctcttattttgaatgcctcttaattaatatcaacgttatttaggaatatgatattgacgtatatcgtcctgaatattttctaagtagtaaatagacttatcgtcatcagtttgttcagtagcgtgatcgaattctaaatcatcgaatcgcttgaagaaactttcatagtcttcaactgaaacttcttgacgttcattcaataaggctttatgtccttcaatatctaattgtttttcatagccttcgactagcgtagcactaaagaattctcctacagaaccagatccatagctaaataatccaatagtttgaccacctttaagtgatctattctctaataatgaaatcaaacttagatataaagagccagtataaatattacctacatagcgattgtaatatactgcatcttcatatccagatgttaaacgttcttgcgtcgtttcatcggcatcattgataattgagtctaaagcttttttacccattttagtgaaaggtacgtggaaacataatgactcaaagtcagataatgttttatcttcacgtcgagcatattcgttccaactttcttggaatgatttgatatatgcatctttagataacgcaccggcaactaatggatatttatgtccagttggtctccagaagtcatacacatcttcagtatatgcaacggcatcatcattcaattctaagatacttggattatttgaaatcaacatagctacggcaccagcaccttgtgtcggttcaccaccagattgaataccgtaacgagctgtatcacttgcgataacaagtaccttttcattaggtcgtttctcaatgtagtctttagctaattggattgcaggtgttgcagcatagcaagcttctttcatttcgaagcagcgtgcgaatggctgaacacctagtaaattgtgaatttgtactgcagcagctttggcattatcgattgcagattcagttgctacaatgaccattccaatatgttttttatcatcatctgttataatatctttagcagcattagcccccatagatacaatatcttgtgatactggactgactgccatttgggtttgaccaatcccaattaaaaatttatttggatcaacttggcgagcttcagcaagcttagccatgtctacatagtatttaggtacgtaaaagttaattttatcgattcctatactcacgggcactacatcctttcgttattctaattttataattcatattaatagtagctttttgagacaatttcatttaaaatgctcactaatagaaagcgttttcatacgaaaagttaaatgcaataacgcatgtcgtttaatacagtaataaaataaaatacgtgaaactgcatggtagaacattgagtgtgagataacttctatcggctattattaataatcatattaatagttattttaccaaattaaataactaaattacaatttatatataaactacatataaggagataaagaatgaaaaaaattgctatagttagtgctaaaagaacgccaatcggtagatataaaggtaaattaagaaattattctgcagttgaattgggaacgacagctttgaaaggtgcaatcgattcagcaaatattgatcctaatataatacaacaagttattttcggtaatgtgctacaaagtggtgtaggacaaaacccagcacgtcaaattgcgattaaagcgggtgtacctgatacaacaccagctatgacaattaatgaggtatgtggatcaggtcttaaagcaattatattagggaaacagttaattcaattaggtgaagcggatgtagtagcagtgggtggagttgaaagtatgacaaatgccccacaattaatcttaaaagaaggtcaagaaccagtggaaagctttatgcatgatggtttaacagatgcctttcattatgtaccaatgggtgtaacagctgagaacatagctgaaaaatatgacatcacgcgtgaaatgcaagatgagttcgcaaatcattcacaagctaaagcagctaaagcgacgcaagatggtaaatttaataatgaaatcatcggtatgactgacgcagaaggggaacaaatgacttctgatgaaggtgttcgcccaaatagtagtgttgagaagcttgcgacattaaagacaattttcaaagaagatgggacagtaactggtggtaatgcttcaagtattaatgatggttcatctgcactcattttaatggaagaatcatatgctaaagcgcatggttacgatattttaggaattgttggagattatgcagaagtaggttgtgacccacaatatatgggctatgcgccattctatgctgttgaaaagctacttgataaaacggatagcaaaatcgatgacgttgatattgtagaaatgactgaagcatttgctgcacaaagtataccagtcaaagacaatttgcatattccagatgaaaaattaaatatctatggcggtgctattgcactaggacacccaattggtgccagtggtgctagattagtcactactttagtgaacgcacttgaacaagaaaataaacgtacgggtattgctacagcatgtattggtggaggactaggtatcgctctaatgattgataaaggggaataatggtatgaagagtttagataagacatttcgacatttatctcgtgaagataaattaaaacaacttgttgattatggatggttaactgatgaaagctatgatgttttactaaaaaatccattaattaatgaagaagttgcgaatagtttaattgagaatgtaattggtcaaggtacattgcctgtaggtttattacctaaaatcattgtcgatgataaagaatatgttgtaccgatgatggttgaagaaccttcagtagtagctgctgcaagctatggcgctaagttagtcaacaatacaggtggctttaaaacagttaagagtgaacgattaatgattggccaaattgtatttgatgatgttagtgatacagatgccttagcacaagccatatatgatttagagccacaaattaaacagatcgcagctgaagcttacccatcaattatagaacgtggtggtggttacagacgtattgaaattgatacgttcccagagaatcaactattgtctttaaaagtatttgtagatactaaagatgcaatgggtgccaatatgcttaatacaatcttggaagctataactgcacatatgaagaatgagtttccaaatcgcgatgtgcttatgagcattttgtctaaccatgccacagcctcagtagtacgagttcaaggtgaaattgatatcaaagatttaaataaaggtgatcgttctggtgaagaagtagcacaacgcatggagcgtgcttctgtactagcacaagtcgatatacatcgtgctgcaacacacaataaaggtgttatgaatggcattcacgccgtagtcttagcaactggtaatgatacgcgcggagcagaagcaagtgcacatgcatatgccagtcgtgatggacaatatagaggtattgcgacttggaagtttgataaagaacgtggtcgcttagtcggaacaatagaagtaccgatgacattagcgatcgtcggtggcggtacgaaagtattgccaattgcgaaagcatcacttgaattattgaatgttcaatcagcacaagaattaggtcaggttgttgctgctgttggattggcacagaacttttcagcatgtagagccttagtttctgaaggtattcaaaaaggtcacatgagtttacaatacaaatcattagctatcgtagtaggtgctcaaggtgatgagattgctcgtgttgccgaagcattgaaagctgcgcctaaagctaatactgctacagctcaacaaattttaaaagatttacgacaacaataacaatatttagaaaagccactaattacgagtaaggttcttaaatcaagacctcgattcataagtagtggcttttatttatcatttatatgtcattatttattttagtagatgta

SEQ ID NO: 105 - DNA, 2846 bp, Staphylococcus aureus
tgtcttactgctgtttttaggttatatttaaatgtctttcaaatacacagattactctggtctgtgatattcgcgaacgttattttcaatatttgataagtagaaaatatgacgatcttcatgaacagcatcttgttcttcgtcaaattcaacgtcatcaaaacgtttgaagaatgtttcatatgcatcaacagatacttcagtacggttatttaataatgctttatgtgcagcttgatctaaatgatctttgtagcctacaactaatgtcgcactataaaattcaacaactgaacctgagccataactgaataaaccgattgtttcaccagcttgtaaatcacgattttcaagtaatgatattaggcttaaatataatgatccagtataaatattaccgacataacggttataatctacagcatcttcatatcctgaacgtaaacgctcttgagttgtttcatcagcgttatcaatgattgactctaatgcctttttacccatttttgtaaatggaacatggaagcatagagatgcgaagtcagctagcgacttaccttgacgttttgcgtattcattccagctttgttggaatgagcggatataagcatctttagataatgcaccatcaactaatggatatttatgtccagttggacgccagaaatcataaacgtcttcagtgtaagcaacagcatcttcatttaatgccaaaatgcttggattatgtgcaataaccatcgcaactgcgccagcaccttgtgttggctcgccgcctgaattcaatccataacgtgctgtatctgtagcaataactaatactttttcattcggtctagttgctaaataatctttagctaattgaattgctggtgttgcagcataacaagcttctttcatttcaaagcaacgtgcaaaaggttgaatacctaataagttgtgaatttgaacagcggctgctttagcagcatcaactgctgattcagttgccacaattaccataccaattttctttttatcttcgtctgttataatgtccttagcagcgttagcgcccattgaaacgatgtcttggtttacaggactaacagccatttcagtttgaccaattccaattaaaaatttgtttgggtctacttggcgtgcttctgctaatttagccatgtctacatagtattttggaacgtaaaagtttattttgtcgatacctattgtcataaggttttacatcctttcaaatttataaaagcaaccacttgtatcatatcagaatatgcttatcttgatacaaagaaatacactaaatttaaaaatgatttgacgtttcttgtaagcgttttaatttaccttgctttattttatagttaaaacaataattattcaattgaattttaagacgaataacgttattttatggtaaaaatagtagtgattgaaatgttaaaaaattatgtgaagtaaaaggatatgtccatgcaaagtttagataagaatttccgacatttatctcgtcaacaaaagttacaacaattggtagataagcaatggttatcagaagatcaattcgacattttattgaatcatccattaattgatgaggaagtagcaaatagtttaattgaaaatgtcatcgcgcaaggtgcattacccgttggattattaccgaatatcattgtggacgataaggcatatgttgtacctatgatggtggaagagccttcagttgtcgctgcagctagttatggtgcaaagctagtgaatcagactggcggatttaaaacggtatcttctgaacgtattatgataggtcaaatcgtctttgatggcgttgacgatactgaaaaattatcagcagacattaaagctttagaaaagcaaattcataaaattgcggatgaggcatatccttctattaaagcgcgtggtggtggttaccaacgtatagctattgatacatttcctgagcaacagttactatctttaaaagtatttgttgatacgaaagatgctatgggcgctaatatgcttaatacgattttagaggccataactgcatttttaaaaaatgaatctccacaaagcgacattttaatgagtattttatccaatcatgcaacagcgtccgttgttaaagttcaaggcgaaattgacgttaaagatttagcaaggggcgagagaactggagaagaggttgccaaacgaatggaacgtgcttctgtattggcacaagttgatattcatcgtgctgcaacacataataaaggtgttatgaatggcatacatgccgttgttttagcaacaggaaatgatacgcgtggtgcagaagcaagtgcgcatgcatacgcgagtcgtgacggacagtatcgtggtattgcaacatggagatacgatcaaaaacgtcaacgtttaattggtacaatagaagtgcctatgacattggcaatcgttggcggtggtacaaaagtattaccaattgctaaagcttctttagaattgctaaatgtagattcagcacaagaattaggtcatgtagttgctgccgttggtttagcacagaactttgcagcatgtcgcgcgctcgtttccgaaggtatccagcaaggccatatgagcttgcaatataaatctttagctattgttgtaggtgcaaaaggtgatgaaattgcgcaagtagctgaagcattgaagcaagaaccccgtgcgaatacacaagtagctgaacgcattttacaagaaattagacaacaatagtaaatggcgaatagcgattttaaagaaaagtttaagtcaatccatcgtagcgcttagataaattaatatgaacaaaaaatacaaacttctatcac

SEQ ID NO: 106 - DNA, 3160 bp, Ips paraconfusus
cgttatcagttcaagtcagttgatagcatagaacttatatagcactccgttcctaaattaatgcagtttagttttgttttggaacaacttaataacattttggagttgggaagaaggctgacattctttgtcgaaaatggtttcgcgcttattcctagctcatggagagttctgcaccaatcatccttgggaagtaatcgttgccacacttacccttacagcatgcatgctcactgttgaacgtcaaaatccaatcccaccaaccaaacctataaccacatcctgccagggttgcattcaagaggctgaatataatgcagcagacctgatctccatgaccatattgagaagtttggctgttttgtactgttactatcagtttcgaaaattgcataaacttggatcaagatacatattaggcattgcagaactattcactgttttctccagctttatcttcactaccactgtgcttaatttactgagagttgaagtcagcgatttaaaggatgccttgttcttctttttactgttaattgacctatccaaagctggcatgctagctcaattcgccttgacttcccaaaatgaaattgaaggcaaaaacaatattgctaaaggtttagctgaattgggtccgacaattaccctggacaccgtagtggaaactctcgttataggcgtgggaactctttcaggagtggaacgactggaaatgttatcatggttcgcatgtctttcagtgctggttaattacgttgttttcatggctttttacccggcatgtctatctttaatcctagagttgtcaagatccacaaacttctataaaacaaaagatccttggatgattttcgcctttaaagaagaggaacataagtcaaatccagtagtccaaagggtaaaactgataatgtctgttgggttaatgattgtacatgttcacagtcgctggccatttaaagacagtgaagtatacaatatcgaaccattagtacagcagtcattcaacaacactgaagagtctaatagtttacacggatacttcgaaaggtggctagcgcttggtgcagaccatatagtgattctcatcctgatcacagcacttttaattaaacttctttttttcgaaatccaagacttgacggaaattagagatcaggagactcaagtagaaccagaaaaaagtgaaaaggccgaaaatacagaaaaggaagagcttaaagtagttcaggaagtacgagaaaacaagagaatgccaatgttcagtttaagtgaagatgattcgtgcgaaaccacattccaagacaaagaagttcaaacgcaaaccccgtacaattcagaggcgcacagttcttcggaagatgatattccaaaagtgtgcaaaacacttgaagattgcttaaaaatctacaacaacgttgatatgggtgcaacagcccttactgatgaagaaatcatcttgctaattaaaaacaggcacatcgcaggttaccagattgaaaaagctgtagataatcctgaaagaggtgttggaattcgtagaaaaattttaggaagggacctcgatgcccctaaagttttggagggtttgccttatcgtaactacgactattctttggttatgggagcgtgctgtgaaaatgtgattggatacatgcccataccagttggatatgctggacctttagtcctagatggaaaagagatttacgttcccatggccactactgaaggatgtttggttgctagcaccaatagaggttgtagggctctaaaagaagcaggggttacaagtagaattgttgctgatggtatgacccgtggccctgtggttcgctttccttcaataatcagagctagccaagctatgcaatggatccaagataattttgatggaatcaaagaacagttcgactcaagcagtcgttttgctagacttcaaagagtaaccatgaaaatagctggtcgattgttgtttatcagatttgttgccacaactggtgacgccatggggatgaacatgctttccaaaggaacagaatattctttaaagtttgtccagagggcttttgaagatatggagatactgagtctcagtggaaacttctgcactgataaaaaacctgctgcagtaaattggattgaaggtagagggaaatcagtggtatgtgaagcgatcgtaccggccaaaatagtagcaaacatccttaaaacaaacgtccacgctttagtagacgtaaacaattccaaaaatatggtcggatctgctgtagctggaagcataggaggatttaacgcccatgcagctaacatagttacagctatctttttagcaactggacaagatcctgcacagaacgttggcagtagtaattgcatgactttgatggaaccttggggaccgacgggagaagatttgtacatttcttgtactatgccttcaattgaaataggtacaattggtggtggtacaattctgccacctcaaggaacctgcttggagatgttaggagtaaggggctccaacatagccgagcctggtgccaatgcaagtcaattagctaaaattgtaggagccaccgtcctagcaggagaattatctttgatgtccgctttagctgccggacatttggttcgaagtcatttaagacacaatagatcaaccactctgctacccgacgcttttgacaaaaacaaaaacattctcgttcctccatgcaaagataaagtctaaactcagttattttttggcaataacagttggttagctgaactttttgttttgccatgtttggctttaatattatgtttagatataccaaaggttcctacttaagttgatgctaatttcatatgcagataagtctactgttacatattagttaacgttaacatatattattatatagaatcagcgggaaaatgaacatgaggttccagctttctagacaaatttggggattttaaacttacttttacatgatttcctagaaacattaaaatcttatttttaatctaaacggcaaccttagtaagtactccaaataatatgttttattttattagtgtaaatgtttctgtgatctatgacattaaatggctgcagcatgagctggcaatggtgacttaactaaaaatatattgaattttaatcttc

SEQ ID NO: 107 - DNA, 8423 bp, Streptomyces griseolosporeus
ggatccaggagacaccgttacccccgcggatcttcgccgcatcgtcctgtccattccacggcaaaggggcacttcttgtacaccgacaccgccgaaacactggagagcgcagtcgatgcgggccgcaaccacaccttgcgggcagccggaatcgccgcacctgcactgcgcgccaccattgacacgctcggcagccgaatacgcccgatcgtcgggtaccacttcggctggctggacctggcggggcagccgacggaccagggcagcggcaagatgattcgcgcggccctgaccgtcctcgcggcggaggcctgcgggggcgatgtccagcgggcggtgtgcggcgccgtcgcggtcgagttggtgcacaacttctccctgctccacgacgacgtcatggacggtgacctcgaacgcagaggacgccccactgtctgggccacgttgggtgtcccggccgcgattctggccggcgacgttctgctcgcgcgtggctgcgcgatcctggagggcgactccgaacaccggacctgggccaccgagctgctcaccgagacgatcgcgacgctcgccgaagggcagatggcggacgtggcgttcgagcaccgcacgaccatctcgctggaggaggcgctggccgtctccgaggcgaagaccgccgcgctgctgagctgcgcctgcgagctgggtgcgggactctccgggggcggggccgaggctcgtgagcgcctggccaagttcggatggcatctggggatggcgttccagctggtggatgacgtcctgggcatctggggcgaccccgcggccaccggcaagccggccggttccgatctgcggaacaggaagaagagcatcccggtggccgcggcgatgaacggcaccggcgcagccgccgaggagttggccgcgatctaccgcggcgcggagccgctgaccgacgacatggccgaccgcgccgccaagctgatcgagtcggccggcggacgtgcgtggacggaagccgagatcgaccggcacaggaggggtgcggcggctcagctggaggctctgggcctcaccgaggagcagcgccggccgctgctggcgctggccgactatgtcgctttcaggaaccactgaagaaacgttccgcctagcacattcctggattcctgacgatgcggtctcaccgcggcaacgacatggggagctgagtgcgttgactcttccgacctcggtggaggagggatcgaaggcccaccgggctcgcgccgtcggcaccggtcgcgctcatgccaaggccattctgctgggagagcacgcggtcgtgtacggaaccccggcgctcgcgatgcccattccccaactcgcggtcacggcaagcgccggctggtccggccgatccgccgagagccggggcggtccgaccttcaccatgaccgggtcggcttcccgcgcggtcacggcacaggccttggacggtctgcgacgtctgaccgcctcggtcaaggcgcacacgggagtgaccgacggacaacacctcgacgtcagcctcgacggggcgattccgcccggccgcgggctcggctccagcgccgcgaacgcacgagcgatcatcctcgccctggccgacctcttcggccgggagctgaccgagggcgaggtgttcgacctggtgcaggaggccgagaacctgacgcacggccgggccagcggcgtcgacgccgtgaccgtcggcgccaccgccccgctcctcttccgggcgggcacggcacaggcgctggacatcggctgcgacgcactgttcgtcgtcgcggacagcggaaccgcagggagcaccaaggaggcgatcgagctgcttcgcgccggattccgggccggggccggaaaggaggaacggttcatgcaccgtgccgcgcacctcgtcgacgatgccagggcctccctcgccgagggcgaacccgaggcgttcggatcgtgcctgaccgagtatcacggcctgctgcgcggggcgggtctgagcaccgaccggatcgatgcactggtggatgccgcgctgcaggccgacagcctgggcgccaagatcaccggtggcggtctgggcggttgtgttctcgcgatgtcccgcccggagcgggccgaggaagtggcccggcagctgcacgccgccggcgccgtacgcacgtgggccgtacagctgaggaggtccactcatgagcgctgaacagccgtcaaccctgctgtccgcgccgcgacggacaccgcgacagccgttgcccagccgaacatcgcgctgatcaagtactggggcaagaaggacgagcacctggtcctgccccgtaccgacagcctgtcgatgactctggacatcttcccgacgaccacccgggtccagctcgcgcccggcgccgggcaggacacggtggccttcaacggcgagcccgcgacgggagaggccgagcggcgcatcaccgcattcctccggctggtgcgggagcggtcggggcgcaccgaacgggcccgcgtcgagacggagaacaccgtccccaccggggccggcctggcctcgtcggccagcggtttcgctgccctcgccgtcgccgccgccgcggcgtacgggctcggtctcgacgcgcggggcctgtcccggctggcccgacgcggctccgggtcggcctcccggtcgatcttcgacgggttcgccgtgtggcacgccggccacgccggcggcactcccgaggaggccgatctcggctcgtacgccgaaccggtgccggccgtggacctggagccggcgctggtggtcgcggtggtcagcgccgcccccaaggcggtgtccagccgggaggccatgcggaggaccgtggacacctcaccgctgtacgagccgtgggcggtgtccagccgggccgacctggcggacatcggagccgcgctcgcccgcggcaacctgccggcggtgggcgagatcgcggagcgcaacgccctcggcatgcacgccaccatgctggccgcacgccccgccgtgcgctacctgtcaccggcctcgctcgccgtgctcgacggcgttctgcagttgcggcgggacggcgtgccggcctacgcgacgatggacgccggtcccaacgtgaaggtgctctgcccgcgttcggacgccgagcgggtcgcggaagccctgcgcgccgccgcgccggtcggagcggtgcacatcgccggtccggggcggggtgcccgcctggtggcggaggaatgccggtgaccggcccgcgcgcggtgacccggcgcgccccgggcaagctcttcgtcgcgggtgaatacgcggtggtggaaccgggcaaccgggcgatcctggtggcagtcgaccggtacgtcaccgtcaccgtgtccgacggcgccgcacccggtgtcgtcgtctcctccgacatcggagccggcccggtgcaccacccgtggcaggacgggcggctgacaggcggtacgggcacacctcatgtggtggcggcggtcgagaccgtggcccgcctcctggccgaacgcggccggtccgtcccgccgttggggtggtcgatcagcagcacgctgcacgaggacggccggaagttcggactgggctccagcggcgcggtgacggtggcgacggtcagtgccgtcgcagcccattgcggactggaactcaccgccgaagaacgcttccggacggcgctgatcgcctccgcccgcatcgaccccaggggatccggcggagacatcgccaccagcacctggggcggctggatcgcctaccgggcgcccgaccgggacgccgtactcgacttgacccgccgtcagggggtcgacgaggcactccgggcgccgtggccgggcttctccgtacgactgtcgccgccccggaacctctgcctcgaggtcggctggaccggcaaccccgtgtccaccacgtccctcctgacggacctgcatcggcgcacctggcggggcagccccgcgtaccggaggtacgtcggggcgaccggcgagctcgtggacgccgcagtcatcgcgctggaggacggcgacaccgagggcctgttgcggcaggtccggcgggcccgtcacgagatggtccgcctcgacgacgaggtcggcctcggcatcttcacccccgaactgacggccctctgcgccatcgccgaacgcgccggcgcggccaagccctcgggggccgggggcggcgactgcggcatcgcgctgctggacgccgaggcccgctacgaccgctcaccgttgcaccggcaatgggccgcggccggggtgctgccgctactggtgtcgcctgccacggaaggagtcgaggaatgagcagtgcccagcgcaaggacgaccatgtccggctcgccacggagcagcagcgcgcgcacagcggacgcaaccagttcgacgacgtgtcgttcgtccaccacgccctcgccggaatcgaccggccggacgtccgcctggccacgacgttcgccggcatcacctggcgactgccgctgtacatcaacgcgatgacgggcggcagcgccaagaccggcgccatcaaccgggacctggccgtcgccgccagggagaccggcgccgccatcgcgtccgggtccatgcacgcctttttcagggacccctcctgcgcggacaccttccgcgtgctgcgcaccgagaaccccgacggtttcgtgatggcgaacgtcaacgcgaccgcgtccgtcgacaacgcccgccgggccgtcgacctgatcgaggcgaacgccctgcagatccacctgaacacggcgcaggagacgcccatgccggagggcgaccggtcgttcgggtcgtggccggcccagatcgcgaagatcacggcggccgtcgacgtcccggtgatcgtcaaggaggtcggcaacgggctcagcaggcagaccctcctggcgctgccggatctgggggtccgggtcgccgacgtcagcggccgcggcggcaccgacttcgcccgtatcgagaacagccggcgccccctgggcgactacgccttcctgcacggctgggggcagtccaccccggcctgtctgctggacgctcaggacgtcggcttccccctgctggcctccggtgggatccgcaacccgctcgacgtcgcccgggcgctcgcgctcggcgccggcgccgtgggctcctcgggcgtattcctgcgcacgctgatcgacgggggcgtatccgccctggtcgcacagatctccacctggctggaccagctcgccgcgctgcagaccatgctcggtgcgcggacccccgccgacctcacccgctgcgacgtgctgatccacggcccgctccggtccttctgcacggaccggggcatagacatcgggcggttcgcccggcgcagcagctccgccgacatccgttccgagatgacaggaagcacacgatgaccgaagcgcacgccaccgccggcgtcccgatgcggtgggtggggcccgtccgcatctcgggaaacgtcgccaccatcgaaacccaggtgccgctggccacgtacgagtctccgctctggccttcggtgggccgcggcgcgaaggtgtcccggctgaccgagaagggcatcgtcgccacgctcgtcgacgagcgcatgacccgttccgtgctcgtcgaggcgaccgacgcgctcaccgcgctctccgcggcacggaccatcgaggcccgcatcgacgagctgcgcgagctggtgcgcggctgcagccggttcgcccagctgatcggcatccggcacgagatcaccggaaacctgctgttcgtccggttcgagttcagcaccggtgacgcctccgggcacaacatggcgaccctggcttccgacgtgctcctccagcatctgctggaaacggttcccggcatctcctacgggtcgatctccgggaactactgcacggacaagaaggccaccgccatcaacggcatcctgggccgcggcaagaacgtcgtcaccgagctgctcgtgccgcgtgacgtggtggccgacgtcctgaacaccaccgccgcgaagatcgccgagctgaacctccgcaagaacctgctcgggacacttctcgcaggcggcatccggtcggcgaacgcccactacgcgaacatgctgctcgcgttctacctggcgaccggtcaggacgcggcgaacatcgtcgagggctcccagggcgtcgtcacggccgaggaccgcgacggcgacctctacttagcctgcacactgccgaacctcatcgtcggcacggttggcaacggcaagggcctgggcttcgtggagaccaacctgaaccggctcggctgccgtgcggaccgcgagcccggcgagaacgcccgccggctcgccgtcatcgcggcggccacggtgctctgcggggagctgtcgctgctcgcggcgcagaccaaccccggcgaactgatgcgtgcgcatgtccaactggaacgaggccacacgaccgcgaaggctggtgtctagagcatgcccctcgccataggcatccatgatctgtcgttcgccaccggcgagttcggctgccgcacaccgccctcgccgctcacaacggaaccgagatcggcaagtaccacgcgggcatcggccaggagtcgatgagcgtcccggccgccgacgaggacatcgtgaccctggccgcgacggctgccgcaccgatcgtcgcccggcacggcagcgaccggatccgcacggtcgtgctcgcgaccgaatcgtcgatcgaccaggcgaagtcggccggtgtgtacgtccactccctgctcggactgccgtcggccacccgcgtcgtggagctgaagcaggcctgttacggggccacggccggcctgcagttcgccatcggtctggtgcagcgcgaccccgcccagcaggttctcgtcatcgccagtgacgtctccaagtacgacctggacagccccggtgaggcgacgcagggcgccgccgcggtcgccatgctcgtaggcgccgatccggggctggtgcggatcgaggatccgtcgggcctgttcaccgtcgacgtcatggacttctggcggccgaactaccgcaccacggctctggtcgacggccaggaatccatcggcgcctacctccaggcggtggagggggcctggaaggactactcggagcggggcggccactccctggagcagttcgccgcgttctgctaccaccagccgttcaccaagatggctcacaaggcccaccggcacctgctgaactactgcagccacgacatccaccacgacgacgtcacgcgtgccgtcggccggaccaccgcctacaacagggtgatcgggaacagctacaccgcgtccgtctacctgggcctcgccgcgctcctcgaccaggccgacgacctgaccggtgagcgcatcggattcctcagctacggttccggcagcgtcgccgagttcttcggcgggatcgtcgtcgccggataccgggaccggctgcggacggcggcgaacatcgaggccgtctcccggcgacggcccatcgactacgccggctaccgcgagctgcacgagtgggccttccccgcccgacggggagcccactccaccccgcagcagaccacgggaccgttccggctgtccggtatcagcggccacaagcgcctctaccgagcgtgctgaccggagcagccccgggccgtgccctggcgatcagttgagccgttgatacgactacggggagcaggagcgatccgacggatgcccggtggagcggccggagccgctcctgccggtgagcaacgggcgttgtggcaggtggcgggaccaccggcaggttgtgaactgcggcgagcccgggcggacttgatcgaccggctggcggaggtggtgcgggaggtgaggcgctcgcgctgcgcgcggcggcttcaccaccaggatccacctgagtgccgacggtcgctgccgggtgaggaggccgaccgggccgccgaccggctccggcgcggcagggcccggggccggccgcccggtttcggcaagggaacgtcaggacacctaccgcctagatgtagccctcgcgcagggcgtaggccacgcgtgggcgcggttgcggagttggaagcgggtggtgacggtgtggatgatgttcttgatcgtccgctccgagtagaggagcttgacggcgatctccccggtgtccatgccgtcggcgaccaggcgcaggacgtcgacctcgcggggcagcatgccgtagtcggcggggttgtggtccgggccgtcgccggtgcggcggcggcccatgcagccgatcagtttgccgagcaggtccgggggcaggtcgccgtggccgcggacggcggtgcggacggcctggcgcaggcgttcgccggtgacttcgcggcgccacaggatggtggtgacgccgagcgagacgacgtcgagcagctcgggctcctggatcc

SEQ ID NO: 108 - DNA, 1305 bp, Leishmania major
atgcgccgctctctgctgcttgcctgctccgccgccaagggtgagagctgggcatccatgtccgatacagagatcatgaagcaggtggagaataagaagattgcatttcacggccttgagcaggctcttgcacccgactatgaccgcgccatcgccattcgtcgtgagattgtgaagaaaaagatatgtccatctccagctgccacacatccgctggagagggttccctacaagaactacgactggagcagtgttgtgggacagagctgcgagaacatcctcggctacgttccggtaccggtagggttggctggtccgctgctgttggatggaaaggaagtggcactgccgatggcgacgacggagggtgcgctggtcgcgagtgcgcaccgcggtgctcgcgccatcaacctgagcggcggatgccggacagcggtgctgaaggaaggcatgacgcgcgcccctgtagtggaggtgaactccttcgacgaggccatcaccgtgatcaagttctgtgaggagcggttcgacgttctaagggaggccttcgagtcgacgacccgcttcgggaagttgctgagcatcaagtgtgccatggcgggtcgccaggtgcatctgcgcttctctgcctttaccggagatgcgatgggcatgaatatgatcacgaagggctgcgacaaggcgctgcaggtgctgcagcagcacattccctctgtgcgagtgctgaccttgtcaggcaacttctgcactgacaagaaaccgtccgcactgaactgggtggagggacgcgggaagtcggtcgtagcggaggccgtcatcaagcgtgatgtggtcgagagtgttctcaagtgcacggtggacagtgttgtgtcgctgaatgtaactaagaacctgcgcggatctgcgcttgccggttccatcggcggcttcaacgcacacgctgccaacatcgtggccgcgctctacatcgccactggccaggaccccgcacaggtagtggagtccgcaacctgcatgacgacggttgacaaggctggtgaggatctcgtgatcagcctcatgatgccgagcattgaggtcggcgccgtaggcggtggtacaggtctgtcgtcgcagcgcgccatgctggagctgatggggtgcgcgggctctaacaaggaggacccaggtgcccactcccgccagatcgcgcgtgtcgttgctggcgcagtcatttgcggtgagctgtccctcttgtccggccttgcagctggccacttactaagcgcccacatgaagctgaaccgcaagcctccgactccgtaa

SEQ ID NO: 109 - DNA, 318 bp, Gibberella fujikuroi
ccgatggcgacgacggagggtgtcttggttgccagtgccagtcgaggttgcaaggccatcaactctggtggtggtgccatcactgttctcactgctgatggtatgactcgtggtccttgtgtcgctttcgagactcttgagcgcgctggtgctgccaagctctggcttgactctgaagctggtcaggatatgatgaagaaggctttcaactcaaccagttcgttcgcccgcctccagtccatgaagaccgctcttgctggtaccaacctgtacattcgattcaagaccaccaccggtgacgctatgggcatgaacatg

SEQ ID NO: 110 - DNA, 1003 bp, Anthonomus grandis
  misc_feature (1)..(1003): n equals unknown
gaggcgatggggatgaacatgatctcaaaaggcaccgaaaaatctttagcttacattaaatcccatttcgaagacatggagattttaagcttaagcggtaacgtgtgcacagacaaaaaaccctctgccatcaactggatcgagggcagaggtaagtctgtggtatgcgaggccattgttccagctaatattgttcacagtatactgaaaaccaccacgcatgcgctagttgacttaaacatatcaaaaaacatggttggctctgcagtgtcggctgccattggtggtttcaacgcgcatgcggccaacatagttacagctatttatatagcaacagggcaagatgtcgctcagaatgtcggaagtagcaactgtatcacccttatggaaccctgcggtgacaagggagaagacttacttatatcttgcaccatgcccagtgttgaaattggaacggtgggaggcggtacagtattgccagcccaaggagcctgtctagaaatgttaggggttaagggcgcacatagtgaaaatcccggtgataatgccaaacagttggcgaaaattgtttgtggtgccgttttggccggggagttatcacttatggccgctcttgtgacggggcatcttgtcaaaagtcatttgcgattaaatcgttcttattccgaaaaagactctccgttcaaaaaatcagttgggggaagttcgtncatgtcaaacataacgcagtttcagtacggttaggtaatttgtttaggatgaaatttttatcttaagggctttgccaatgattcattgtttttcttttattctcatacatgtgtaccattgtaatatttgcaaaaaaaaagactggaggacagacatgcctgtttggaaaccaaaatatttcaaaggaagacaccatgtatctaccatccaaaggctcaactattgtatttatcaagtgatagctatttatatgttgataatgtgaaagtgtattaaatgtacatatagaaac

SEQ ID NO: 111 - DNA, 3021 bp, Dendroctonus jeffreyi
ttcagtttattttggacggaagaatggtggctcaattattgacgacttgtggcctaaatttcttagatcgtgcgtcttctggaataacttggatattctcatcccaaatggcttcacgtttatttcgagtacatggtgaattttgcaccaatcacccgtgggaagtcattgtagcgactctcaccctcacagcgtgtatgttaactgttgaacagcaacctccacttcgaccgataaaaccaaccattaaatcatgtttgggatgcattcaagaggccgaacacaatgctgctgatctaatatcaatgaccatcttaagaagtttggctgttctttattgctactaccagttccgcaagatgcataagctcggatcaaaatatgtcctgggaattgcgggacttttcaccgtgttctcgagcttggtctttacgacaacagttctaaacattcttcggataaaagtcagcgatctaaaagatgcgctattctttttcttgctccttatcgatctatccaaagcggctattttagctcaattcgctcttaatggggccaatcaagctgaaagaaaaaccaatatagcgaaaggattagctgagttagggccgacgatcactttagacacactggtagagacactagttattggcgttggcaccatgtcgggagtagctagattagaaatgctgtcgtggtttgcctgtctgtcggttctggtcaactatattgttttcatgactttttatccagcatgtttgtcgctgattttagagttgtctcaatcgagcaatttttgcaaaaccaaagattcctggaagatattcgcatttaaagaagatcgcaagtcaaatcctgtcctacaaagagttaagttgatcatgtcagttggtttaatggtagttcatgttcaaagtcgttggccattcagagacagtgaagtatacactatagagccactagtgcaacagtccttcaataaaactgatgattccattgccacacatgtatctttcataagatggttggttcttggtgctgatcatattgtcataataatactggtctcagcccttttaattaaactgattttcttcgaaatcaaagataatttagtggaaataaagcccggttttgacaaagaaacgccgaagccaacgaaacaaatgccaatgatcaattttactttgggtgaatcatgcgaatccacctacgaagataaagaagtacaaacgttagctacctcgaattccgatgttgatagttcttctgatgatggagtgccaaagcagtgtagaagtttagaagattgcgtaaagatcttcaaaaatatagatcttggtgccacggccttgaccgacgatgaaataatactactgataaaaaataagaatattgccgcctaccaaatagaaaaagaagtagatgacccagaaagaggtgtgggaattagaagaaaaatattaggcagagatctgttagaatcccccaagctccttgaaaacttgccctttaggaattatgattattctttggtcatgggtgcgtgttgcgaaaacgttattggatacatgcccataccagtaggatatgccgggcctttgcttctggatggtcgtgagttgtatattccaatggcaacaactgaaggttgcttggtcgctagcactaatagaggatgtagagctttaaaagttagtggggtgaccagcagtgtggttgctgatggcatgactcgcggtccagttgtgagatttccatccattgtcagaaccagtcaagcaatgcagtggatccaagacccagataacttcaaaaaaattaaggaacaattcgattcaagcagcagattcgcccgactgcaaagactcactcttaaaatagcgggacgatttttatttattagattcatcgccaccactggagatgccatgggcatgaacatgttgtctaagggtaccgagtactctttgaaattggttcagcaagtattttatgatatggaaatcctaagtctcagtggaaacttttgtaccgataaaaagccggccgccattaattggatcgagggaagaggaaaatctgtagtttgcgaagccatagttccagcaaaaattatttcctccatactaaaaaccaacgtccatgctcttgttgatgtgaacaacatccaagaacatgtaggctccgctgtggccggtagcataggtggattcaacgctcatgctgctaatattgtgacggcgattttcttagctactggtcaagatccagctcagaatgttagtagtagcaactgcatgactttgatggaaccatgggggcccgatggagaagatttgtacatttcttgcaccatgccttctattgaaattggcactattggtggagggacaatattgccagcacaaagcgcctgcttggatatactgggagtaaaagggtcaaacagagaaaatcccggtgcgaatgcgtgccaattagccaaaattgtatgtggaacagtattagccggcgaattatctctaatgtcggccttaacagcgggacacttagtgaagagtcacttgaggcacaaccgatccactaccttattaccagatgccttcgacagaaagaaaatatcttttacccagctgccaagataatgcttgaaaatccatatccatgaattaattttgagcagctcggtgcatacccttcatttttcagatataccaaaggttcctaaatggatttaaatatataaagagaacatgggagaaaaggacaaattttgactaatataaatgataagataaattaacagagtgaatgtgaactatgtgttatgcttatttggaattgagctgatgaactaaatacaattatgtacccaatcaaaaaaaaaggagatactagcttaaaggtctccgcgatttggcaattcaatcttaatttaatgaaatttggcggcatcgtaactttgatgtatctacacaaataaaaatagttttaagctgtaaatatatatttcatagc

SEQ ID NO: 112 - DNA, 5874 bp, Dendroctonus jeffreyi
ccgagcgataaatattaaagttttcatggtggtattctggcgcccctttccataatcactaatttagcatccacttgacctaagaatatttatagtcgatttatctagattttaaactaacggaaagaaggaagcggcccgcaactattatgtggatatcaataacctatgagttaatgatattcaattattagaaaacagagataccgagagagattaggctttctagctgtattcattaattagagctgttgatagtctcagcttagtacgtgagcataagtgcggcgttcagataattagcaacaaatattcttcatgggtttctagcaggtggttttccaaaattgtaccgcttccgtagaaatcgtgatacacatgaaaatattcctacagtagcagcaatagacttgctatagagtataaaataattttgttaaatattttttttcgctttcaggccgaacacaatgctgctgatctaatatcaatgaccatcttaagaagtttggctgttctttattgctactaccagttccgcaagatgcataagctcggatcaaaatatgtcctgggtaaaactcataacatttgattaaatactattcggctttaatatgaatacatataacgcattaactccattcaaagaaagtgaagagaaaagcaattcaaggccatgaacttacaatctacaacatgttattcgatagagtgaaagtgcaatgccgcttttatgtcatatgaaactaattgtcgtaatttccaatttatgtaacatcggacgtgttttttatcatgtgcgaactccaaatgaactttgcactaaaaagagccaattttgaattgatcttctcgttcatcttttctgcgtagataacatgctcattcaaataatcatagaaaccacactaaattaatttaaattttaggaattgcgggacttttcaccgtgttctcgagcttggtctttacgacaacagttctaaacattcttcggataaaagtcagcgatctaaagtgagttaacacgcaaaaaataacccgatratagtaatatttttttcagagatgcgctattctttttcttgctccttatcgatctatccaaagcggctattttagctcaattcgctcttaatggggccaatcaagctgaaagaaaaaccaatatagcgaaaggattagctgagttagggccgacgatcactttagacacactggtagagacactagttattggcgttggcaccatgtcgggtaacttattttctacattaattcttgaattaaaacgaaaaattaactttgaaatctggctgaaaaactataattttttacaggagtagctagattagaaatgctgtcgtggtttgcctgtctgtcggttctggtcaactatattgttttcatgactttttatccagcatgtttgtcgctgattttagaggtaagtcattgtttttaactgatccaattctaggactttgaggatgttacagccctaataaaacatttttttaaattaagtttcacagttaatcaatcaaaataacagtagtagattttgcatagcgcgtagatatgcactaccaatttgtattctcctaattaacaaagccaatgctacttgatctaaataatgtatttaagattttatactttgcgtcttaaaataaacctggctggcagatttgacatcaccctttatgatcaaatgtaattttagcagccccacttcctgttagcatgcctaaggtgacccaaaacttattaacataacaaaaataaacagtatacatggaaccacaagtagatacctaaactttttcaacagtcatcggttttgaaaatcatcggtcatatttgcgcagatggttctaccagttaacaagttctcgtttgcgttccatataatctattcgtataagacaccgaataatctttgttttagttgtctcaatcgagcaatttttgcaaaaccaaagattcctggaagatattcgcatttaaagaagatcgcaagtcaaatcctgtcctacaaagagttaagttgatcatgtcagttggtttaatggtagttcatgttcaaaggtgagtgagaattcattatttaaaaaaatatttttctttttctcgctgaattttatataccaaaaaattgctgacattgaaattattggatgttcagttcatctacaacttttacataaatatggtaatattttgtatttgcatatttatgtatttctattcaatgtttttaagcttgtagattttgcgctgattagatgttaccactctttaaatttttcccattttcagtcgttggccattcagagacagtgaagtatacactatagagccactagtgcaacagtccttcaataaaactgatgattccattgccacacatgtatctttcataaggtaattacaatttgtcttattacttagaatatcgtataaaccggtcacattgcagaacagtagattatgaaattttaccacttgcaatcgctctttcactgaatcaagtaattaattggaactaacgagaaataaagactgaataccgattaattgcattctagaacgaagacgtcacattgaatagcaattagtcagtaaattacattaaatacaccgaaaatcattaaatttatatacaagttgaatactccgctattaaagtattggaacagaatctgttcttggtaaatctgatttatcgaattgctgcatttttattgagtacgcaatactcgacctcttcagagagtaattgaatattcgctaaactttccaccaaaggattgcaattttggaaaaaatgtcgtaacaccgtgtgaaagtatttccccagatgtttcattcgccttacaaatatatatctacttttctccaatgattttaatgtatgtgctgttttatatcgttttaaccattcgctttgtccataaaatctgtgtaaatttttctgtgatttcttgtcttgtctttgcagatggttggttcttggtgctgatcatattgtcataataatactggtctcagcccttttaattaaactgattttcttcgaaatcaaagataatttagtggaaataaagcccggttttgacaaagaaacgccgaagccaacgaaacaaatgccaatgatcaattttactttgggtggtaagtgattcaatgattcaataaattaataactaagtatttaaattgacgtcagtactgcaaacaaagtgcaaacgcaaaaatctagccaatgggttagccatttatttatttgagaagaagtcgtcaggtcggtgtaaaggcgatacttatctaaaaaacgtcctttgtgttgtatgaatgggtaaatttaaatgtatgtaagttctcaatgactaacccaatatcattcaacaatgtcaagtttaaatcgaaactcgcacaacaattctctgtttgagaagaagcatttctgcacacttgctttacctctttctcaactctgattcactgaattatttattaattttacttcctgctaaatattgcgtaaatttcaaaaaatagatacacaaacatatttaaaatcattcgcccggtcagggtcaaatatattttgggttctaacagccaacttttggaaatggtattcgtagaatcatgcgaatccacctacgaagataaagaagtacaaacgttagctacctcgaattccgatgttgatagttcttctgatgatggagtgccaaagcagtgtagaagtttagaagattgcgtaaagatcttcaaaaatatagatcttggtgccacggccttgaccgacgatgaaataatactactgataaaaaataagaatattgccgcctaccaaatagaaaaagaagtagatgacccagaaagaggtgtgggaattagaagaaaaatattaggcagagatctgttagaatcccccaagctccttgaaaacttgccctttaggaattatgattattctttggtaagtttgggtagtttcctatatattcgtctctagtcaactgtgcgatttttaaggtcatgggtgcgtgttgcgaaaacgttattggatacatgcccataccagtaggatatgccgggcctttgcttctggatggtcgtgagttgtatattccaatggcaacaactgaaggttgcttggtcgctagcactaatagaggatgtagagctttaaaagttagtggggtgaccagcagtgtggttgctgatggcatgactcgcggtccagttgtgagatttccatccattgtcagaaccaggtaaattttccctactggaccagacctgttttgattaaatctgcattggatttcagtcaagcaatgcagtggatccaagacccagataacttcaaaaaaattaaggaacaattcgattcaagcagcagattcgcccgactgcaaagactcactcttaaaatagcgggacgatttttatttattagattcatcgccaccactggagatgccatgggcatgaacatgttgtctaagggtaccgagtactctttgaaattggttcagcaagtattttatgatatggaaatcctaagtctcagtggaaacttttgtaccgataaaaagccggccgccattaattggtaagaaatagaaatcgcctctccctttcaattcctttgagggaaaacagytcaattacaataaaataaatgtaaataaagtatgartacaccacaagtctcaaccaatcaacgattatttgcgcagatacggacaattgattattttaaagtatgcaaaaccacaaaaaatagttgacacagaaagatgcgcctgaaagacgaaataacagaagcccgttttttaggatcgagggaagaggaaaatctgtagtttgcgaagccatagttccagcaaaaattatttcctccatactaaaaaccaacgtccatgctcttgttgatgtgaacaacatccaagaacatgtaggctccgctgtggccggtagcataggtggattcaacgctcatgctgctaatattgtgacggcgattttcttagctactggtcaagatccagctcagaatgttagtagtagcaactgcatgactttgatggaaccatgggggcccgatggagaagatttgtacatttcttgcaccatgccttctattgaaattggtaagatcaataacatatacgttgttcttgtaaacacatcggattctcttaggcactattggtggagggacaatattgccagcacaaagcgcctgcttggatatactgggagtaaaagggtcaaacagagaaaatcccggtgcgaatgcgtgccaattagccaaaattgtatgtggaacagtattagccggcgaattatctctaatgtcggccttaacagcgggacacttagtgaagagtcacttgaggcacaaccgatccactaccttattaccagatgccttcgacagaaagaaaatatcttttacccagctgccaagataatgcttgaaaatccatatccatgaattaattttgagcagctcggtgcatacccttcatttttcagatataccaaaggttcctaaatggatttaaatatataaagagaacatgggagaaaaggacaaattttgactaatataaatgataagataaattaacagagtgaatgtgaactatgtgttatgcttatttggaattgagctgatgaactaaatacaattatgtacccaatcaaaaaaaaaggagatactagcttaaaggtctccgcgatttggcaattcaatcttaatttaatgaaatttggcggcatcgtaactttgatgtatctacacaaataaaaatagttttaagctgtaaatatatatttcatagc

SEQ ID NO: 113 - DNA, 1884 bp, Streptomyces sp.
ggatcctgggtctcgcagatcgagaagatcacggcggccgtcgacctgcccgtgatcgtcaaggaggtcggcaacggcctgagccgcgagaccgtcctgacgctgcgacagtgggtgtcagcgtggcggacctcggcggccggggcggcaccgacttcgcccgcatcgagaacggccggcgcccgctcggcgactacgccttcctccacgactggggccagtccaccgccgcctgcctcctggacgcgcagggcgccggtctccccgtgctcgcctccggggcgtccgccatcccctcgacgccgcccgagccctggccttgggcgcctccgggtcggggcctccggagtgttcctgcgcaccctgctcgacggcggtgtcgaggcgctgatcgcacagatcacgaactggctggaccagctcgcggccctgcagaccatgctcggcgcacgcacccccgccgagctcgcgagcaaggacctgctgatccacggcaccctgcgaaccttctgcgccgaccgggacatcgacgcggggcgactcgccggcgtacccgatcggccgacgccctccacgattcgactgaaagagcacgatgaccgacacgcacgccattgccatggtccccatgaagtgggtcggcccccttcgcatctccgggaacgtcgccaccaccgaaacgcacgtcccgctcgccacctacgagacgccgctgtggccctccgtgggccggggcgcgaaggtgtccatgctgtccgagcggggcatcgccgcgaccctcgtcgacgagcggatgacccgctcggtgctggtcgaggcgaccgacgcccagaccgcgtacacggccgcccgcgccatcgaggcgcggatcgaggaactgcgcgccgtggtccgcacctgcagccggttcgccgagctgctccaggtccggcacgagatcgcgggcaacctgctgttcgtccgcttcgagttcagcacccggcgaccctccggccacaacatggccaccctcgcctccgacgcgctgctggcgcacctgctgcagacgatcccgggcatctcctacggctcgatctccgggaactactgcacggacaagaaggcgaccgcgatcaacggcatcctcggccgcggcaagaacgtggtcaccgagctggtcgtggagcgcgaggtggtggaacgcgtcctgcacaccacggccgccaagatcgtcgagctgaacatccgcaagaacctgctcggcaccctgctcgccggcggcatccgctcggccaacgcccactacgccaacatgctgctcggcttctacctggccaccggccaggacgcggccaacatcgtcgagggctcccagggcgtcaccctggcggaggaccgcgacggcgacctctacttctcctgcaacctgcccaacctcatcgtcggcaccgtgggcaacggcaagggcctggagttcgtggagacgaacctgaaccgcctcggctgccgcgaagaccgcgcccccggcgagaacgcccgccggctcgccgtcatcgcagcggcgacggtcctctgcggcgagctctcccttctcgcggcccagaccaacccgggcgaactcatgcgcgcacacgtcgaactggagcgcgacaacacgacagcagaggtcggtgtctgagaatgtcccacgagtctttcttcggaatccacgatctgtccttcgcgacgaccgagtacgtcctgtcgcacgaggcgctcgccgagtacaacggcaccgagatcggcaagtaccacatcggcatcggccagcggtcgatgagcgtgcccgccgcggacgaggacatcgtgacgctggcgccgccgccgccgccccgatcatcgcccggcacggttccggacggatcc

SEQ ID NO: 114 - DNA, 1600 bp, Streptomyces griseolosporeus
ggatccgcaacccgctcgacgtcgcccgggcgctcgcgctcggcgccggcgccgtgggctcctcgggcgtattcctgcgcacgctgatcgacgggggcgtatccgccctggtcgcacagatctccacctggctggaccagctcgccgcgctgcagaccatgctcggtgcgcggacccccgccgacctcacccgctgcgacgtgctgatccacggcccgctccggtccttctgcacggaccggggcatagacatcgggcggttcgcccggcgcagcagctccgccgacatccgttccgagatgacaggaagcacacgatgaccgaagcgcacgccaccgccggcgtcccgatgcggtgggtggggcccgtccgcatctcgggaaacgtcgccaccatcgaaacccaggtgccgctggccacgtacgagtctccgctctggccttcggtgggccgcggcgcgaaggtgtcccggctgaccgagaagggcatcgtcgccacgctcgtcgacgagcgcatgacccgttccgtgctcgtcgaggcgaccgacgcgctcaccgcgctctccgcggcacggaccatcgaggcccgcatcgacgagctgcgcgagctggtgcgcggctgcagccggttcgcccagctgatcggcatccggcacgagatcaccggaaacctgctgttcgtccggttcgagttcagcaccggtgacgcctccgggcacaacatggcgaccctggcttccgacgtgctcctccagcatctgctggaaacggttcccggcatctcctacgggtcgatctccgggaactactgcacggacaagaaggccaccgccatcaacggcatcctgggccgcggcaagaacgtcgtcaccgagctgctcgtgccgcgtgacgtggtggccgacgtcctgaacaccaccgccgcgaagatcgccgagctgaacctccgcaagaacctgctcgggacacttctcgcaggcggcatccggtcggcgaacgcccactacgcgaacatgctgctcgcgttctacctggcgaccggtcaggacgcggcgaacatcgtcgagggctcccagggcgtcgtcacggccgaggaccgcgacggcgacctctacttagcctgcacactgccgaacctcatcgtcggcacggttggcaacggcaagggcctgggcttcgtggagaccaacctgaaccggctcggctgccgtgcggaccgcgagcccggcgagaacgcccgccggctcgccgtcatcgcggcggccacggtgctctgcggggagctgtcgctgctcgcggcgcagaccaaccccggcgaactgatgcgtgcgcatgtccaactggaacgaggccacacgaccgcgaaggctggtgtctagagcatgcccctcgccataggcatccatgatctgtcgttcgccaccggcgagttcggctgccgcacaccgccctcgccgctcacaacggaaccgagatcggcaagtaccacgcgggcatcggccaggagtcgatgagcgtcccggccgccgacgaggacatcgtgaccctggccgcgacggctgccgcaccgatcgtcgcccggcacggcagcgaccggatcc

SEQ ID NO: 115 - DNA, 246 bp, Mus musculus
  misc_feature (1)..(246): n equals unknown
tcagccctcgtgcctcccgtaacttgttctctttcctcaattttcccaccngactcataccgccgactttagactttaatctgcgacgcgcttacaaattttaaacctacgggccaggaggtgggggagacaagggcagagttcttccttttccccaaagcacaagctgaacaccagctgattttggggctaggagagttatcaatcatggacagggtatgaggcccaaaataaaagccggtcaag

SEQ ID NO: 116 - DNA, 234 bp, Mus musculus
aattctgcctattgagccaaagatggaaccacatgaatccccctggagctctgtgccttattcctgaggccaggagtttgctgactgaattatttatgggctcctttaatgggcccataaaagcttttagtttcctcagggggtcagcagagttgttgaatcttaattttttttttttaatgtaccagttttgtataaataataataaagagctccttattttgtattctatct

SEQ ID NO: 117 - DNA, 262 bp, Mus musculus
acattctattccaagcctaatgaagggaaattcaacttacaaacccaatgatggagccacatgaatgcccctggagctgtgaaccttgttcctgtggacaggaatttggtgactgaatcatttatgggctcctttaatgggcccataaaagatcttagcttcctcagggggtcagcagagttgttgtttcttaattttttttttttaatgtaccagttttgtataaataataataaagagttccttattttgtattctattt

SEQ ID NO: 118 - DNA, 234 bp, Mus musculus
aattcaacttacagacccaatcatggagccacatgaatggccatggagctttatgcttttttcatgtgccctggagtttggtgactgaatcatttatgggttcctttaatgggcccataaaagtttttagcttcctcagggggtcagcagagttgttgatttttaattttttttttttaatgtaccagttttgtataaataataataaagagctccttattttgtattctatct

SEQ ID NO: 119 - DNA, 307 bp, Mus musculus
tccttggcccagagaaaactctgttcgtttgcactattccaaaatactctggcttgctttcctagcccattgaagggaaaatcagcttacagagccaatgatggacccacatgaatgcccctggagctgtttcccttgttcctgtggccaggagtttggtgactgaatcatttatgggttcctttaatgggcccataaaagcttttagcttcctcaggggttcagcagagttcttgatttttatttttttttttttaatgtaccagttttgtataaataataataaagagctccttattttgtattc

SEQ ID NO: 120 - DNA, 198 bp, Mus musculus
cactcttaccacccacccttgaaccagaacttttcttcagaattaacatgattaaaaacaaataaaagataaatttacaaaattttcaaggaacgtgcaccaagaaggcagcttgagaatcctgacactgaactgaagcgcgggcattgggttatcaaggactaacatgcaatctgtgaattaaaaatttcaatgcat

SEQ ID NO: 121 - DNA, 222 bp, Mus musculus
gccagtgccatctcgaaggatcctgatctgtccctctccgcaaccctacccgctggacatctaatcagaagttacatgctttacaacagattaaagataaatttacaatatcttcttggaacgtgcaccaagaaggcagcttgaggatcctgacattgaactgaagcgcgggcattgggttttcaaggattaacatgcaatctgtgaattaaaaatctcaat

SEQ ID NO: 122 - DNA, 1919 bp, Artemisia annua
agtgattcctcacaaacccacgatggatctccgtcgtaaactgccacccaaaccaccgtcatcaaccaccaccaaacaaccgtcacaccgctcacattcaccaacaccaataccaaaagcctcagacgcattaccattaccattatacctaaccaacaccttcttcttcaccttattcttctcagtcgcttactatctccttcacagatggcgcgacaagatccgttccggcacaccgttgcacgtcgtcacgttaactgaattatccgctattgttttactcattgcttcctttatttatttgttaggtttctttggtattgattttgtccagtcgtttacttcgcgcgaaaacgaacaattgaataatgatgatcataatgttgttagtactaataatgtgttgtctgatagaaggcttgtttatgattatggatttgatgtcactggtgataatgataatgataatgatgatgatgtgattgttaagagtgttgttagtggtgaggtgaattcgtattcgttagaggcgagtttaggtgattgttatagagcggctaagatacgtaaacgtgcggttgaaaggatcgtagggagggaggttttagggttagggtttgaggggtttgattacgagagtattttagggcagtgttgtgagatgcctataggttatgtgcaggtgccggttggggtagcggggcctttgttgttgaatggcggggagtttatggtgcctatggcgactacggaagggtgtttggttgctagtacgaatagagggtgtaaggcgatatgtttgtccggtggggcgacggcgattttgttgaaagatgggatgactagagcgcctgttgttaggtttgccactgcggagagggcttcgcagctgaagttttatttggaagatggggtgaattttgacacgttgagtgtcgttttcaataaatcaagcagatttgctaggctccaaaatattcaatgctcaattgccggaaagaatctatatatcagatttacttgcagcacgggtgatgcaatgggaatgaacatggtgtcaaagggtgtccaaaatgtgttggattttcttcaaaatgatttcccagacatggatgtgattggtatatcttggaaattctgttcggataaaaaacccactgcagttaattggattgaggggcgtggaaaatctgttgtgttccaagcagtaatcactaaaaaggttgtgagaaaaagtgctttaaacccccagacctgcacttgtagaaccttaacatgcttaagacccttactggttctgctattgctggttctcttggtggatttaatgcacatgctgcatatcgtatctgcagtctttatagccactggtcaggatccggcccaaaacattgagagctctcactgcataactatgatggaagctgtcaataatggaaaagatctgcacgtaaatgttaccatgccttcaatagaggttggcacagttggaggagggacacaattagcatcacaatcagcatgcttgaacctacttggagtcaagggtgcgtgcatagaatcaccaggctcaaacgctcaattgctagcaaggatagttgctggttcggtgttggctggtgaattgtcgttgatgtctgccatatcagctgggcagttggttaaaagccatatgaaatacaacagatcaagcagagacatgtcagcaattgcgtcaaaggtgtgaaagcttttgcgatttccttatttattgtttgtgtgtattagtgtatgtataaaattcatttggggtgtgcggttttgaagggttatttataagttggtattttttgatcggtaattatttatttgctactgatgaaagtatcaaacttcttttctttgcctcagttaagcatccgtttctgtaaaatcgaatt

SEQ ID NO: 123 - DNA, 2880 bp, Candida utilis
ctggcggtggtgcaacagtatatgagcaacgggttctcctacgatgaaccggcagcggttatgttctaccacggtgcaagcgcaaaccaacattggattgcagttgacgacttgagcaaagtcccagtggatgtggaccactacaacgttgtcccattccagttccgcagagctggcgagtacaaggagccggtgttatcaggaatcgttgagttggatgaggtgaagtttgttgtttctcagtctgatgccgctgagcaatggcaacagttgaccgctgaggacggcactgtgtggcgttcaagagcgtatcacggcaaactgggtaagtactctgacatggctgttggtgctttcaataaggtgttgaacttggtcagaggggccgaaacctttgacattgccctggtgacttgtgcgtacattgccatgttctatacactgtttaacctctttgctagaatgagggcagtcggctctaaggtttggctaggattgtcaactcttgtgtcctcgttctttgccttcttgtttgcactgtacatcaccacgagggtgttggatctttcaattcccttcctctctttgtctgaaggcattccgttctttgtcgcagtggttggtttcaacaacaagattttgttggcagagaaggttttgcaaaatcaactcaacgctcaatcatcgaagaacgatgctccaaccgttctgtatcaggcattaagggaacaaggcccattgctcttgcgtgatcacttgtttatgattactgcattcttgggatgctccttttacgcgtcgtacttggatggactgaagaatttctgtatattggcagctctcatcctagcattcgatatactcaccacctctaccttcctatctgcaatcttatcactcaagctggaaattaaccaaatacacagatcaacgttgctgagagaacaactcgaagatgacggcttaactgaaaccacagttgatgatgttctcaaatccaatagtctcgctggaactaagactttcacagatgccccatctactctggttacagttgccaaggttgctggtgtttcagtcttctttggattgcacttttatggatttggatctgcttggctatccgatttgagcgctggtaatgagacaaatgacactttcaccttatacgatgcggtcgcagatcaaattcctattggttcaaacggtaccttggttactttattcccaacacgttttttcctccctgaaaaactatccacacaaattgaagccgtggttctatcattcattggtcttatttcaactgctgcccgtgataaatacatctcaaaattcattctctttgcatttgccgtttctgcatccatcaacgtctaccttttgaacgttgcccgtatccataccacaagattggaggatgcaatcgaattgaaaaagccaaagaagaaagcttcgaagacagctgtcagtgttcctaaagctgttgtggttaaagattcagaaactacaaaatcctcggaaatcttgcactcatcttctgagagtgaatctgagcaatcttcacgtccacttgaacaagttattgagttatacaaggatggtaaagttaagacccttgttgacgatgaagttgtatcccttgttactgctggtaagttaccactgtatgctctagagaaacaattgggtgataacttgagagccgttgctattcgtcggaaagccatctctgatcttgcagatgctccagtcttgagaagcaataaattaccatacttgcactatgattacgatcgtgtatttggtgcatgttgtgaaaatgttatcggttacatgccattaccagtcggtgtcgctggtccattgattattgatggcaagccgtaccatattccaatggcaaccacagagggttgtcttgttgcttctgctatgcgtggttgtaaagccattaatcttggtggcggtgtaacaacggttttgactaaagatggtatgacgcgtggaccatgtgttaaattcccaagtttgaaacgagcaggtcaatgtaagctatggttggactccgatgagggccaagaagaaatgaagaaagccttcaactctacttccagatttgccagactccaacatttgcaaactgctcttgcgggtgacttgttgttcattcgtttcagaaccgtcactggtgatgctatgggtatgaatatgatttccaaaggtgttgaatatgctcttaaacaaatgacggaggtgtttggatgggacgatatgatggttgtttctgtttctggtaactactgtaccgataaaaaaccagctgctgttaactggatcaatggtcgtggtaaaagtgttgttgccgaggcttccataccaaaggatgctgtggttaaagttttgaaaagttctgttaaagctgttgttgatgttaatgtcaacaagaacttgatcggatcagctatggctggtagtgttggtggtttcaatgcccaagctgctaatatggttaccgcagtttatttggctttgggtcaagatccagcccaaaacgttgaatcttccaactgtattacactaatgactgaaacggaggacggagatttgaaagtttctgtttccatgccatctattgaagtcggaaccattggtggtggtaccatcttggacccacagggatccatgcttgaacttctcggagtacgtggaccagctgatgttccaggagaaaatgcccgtcaactggctaaaatcgttgcatctattgttctttccggtgaattatcgctagttagcgcacttgcagctggtcatttggtgcagagtcatatgcagcacaacagagccgctgctaagaaataagcatacgactcacca

SEQ ID NO: 124 - DNA, 1470 bp, Candida utilis
atgatccataccacaagattggaggatgcaatcgaattgaaaaagccaaagaagaaagcttcgaagacagctgtcagtgttcctaaagctgttgtggttaaagattcagaaactacaaaatcctcggaaatcttgcactcatcttctgagagtgaatctgagcaatcttcacgtccacttgaacaagttattgagttatacaaggatggtaaagttaagacccttgttgacgatgaagttgtatcccttgttactgctggtaagttaccactgtatgctctagagaaacaattgggtgataacttgagagccgttgctattcgtcggaaagccatctctgatcttgcagatgctccagtcttgagaagcaataaattaccatacttgcactatgattacgatcgtgtatttggtgcatgttgtgaaaatgttatcggttacatgccattaccagtcggtgtcgctggtccattgattattgatggcaagccgtaccatattccaatggcaaccacagagggttgtcttgttgcttctgctatgcgtggttgtaaagccattaatcttggtggcggtgtaacaacggttttgactaaagatggtatgacgcgtggaccatgtgttaaattcccaagtttgaaacgagcaggtcaatgtaagctatggttggactccgatgagggccaagaagaaatgaagaaagccttcaactctacttccagatttgccagactccaacatttgcaaactgctcttgcgggtgacttgttgttcattcgtttcagaaccgtcactggtgatgctatgggtatgaatatgatttccaaaggtgttgaatatgctcttaaacaaatgacggaggtgtttggatgggacgatatgatggttgtttctgtttctggtaactactgtaccgataaaaaaccagctgctgttaactggatcaatggtcgtggtaaaagtgttgttgccgaggcttccataccaaaggatgctgtggttaaagttttgaaaagttctgttaaagctgttgttgatgttaatgtcaacaagaacttgatcggatcagctatggctggtagtgttggtggtttcaatgcccaagctgctaatatggttaccgcagtttatttggctttgggtcaagatccagcccaaaacgttgaatcttccaactgtattacactaatgactgaaacggaggacggagatttgaaagtttctgtttccatgccatctattgaagtcggaaccattggtggtggtaccatcttggacccacagggatccatgcttgaacttctcggagtacgtggaccagctgatgttccaggagaaaatgcccgtcaactggctaaaatcgttgcatctattgttctttccggtgaattatcgctagttagcgcacttgcagctggtcatttggtgcagagtcatatgcagcacaacagagccgctgctaagaaataa

SEQ ID NO: 125 - DNA, 5785 bp, Oryza sativa
agtactattcatattttatcatcccataacaataaaaatgcaaattatcaaaaaaattcaaataagacggacgattaaagttgggcatgaaaacttatggttgtacttaaaatgggacagaggaagtataagccagttataacgcaatatgtgtatgacaggtaggaccatgtacatatactacactattaatatctggtctcagcatcataaacatattacatcttggaatccgtgctgcagcttgctataaatctgtagttcgttgctcttcttttttcttctttttcttcttagatgtgtttatagctgactgcaattggacctgctcttagatgaagatagtcagctacacagaaaaaaaatgcttatattggtagacggaggcgataatccttgtcatacggtgattgatcgtaagaaatttccactttgccaaacaagaccttttaagtgggcccgggaagaggcggtaatcgcaccgggaatgggccggggcccgctcggctaatccgcttattaaaagggcccatcttaccccggcccccaatactcccccgtggccgcccgcgcctcgaggccccgacacacccgctcccccaccacctcgcgctcgcggcggccaccggcgcggcggcggcggcggcgtgccttgccttgcctagctcgctggtgccatggaggtgcgccgcagggcgccgctgccgccgccgcccgggagggtgcaggcgggcgacgcgctgccgctgccgatccggcacacgaacctgatattctcggcgctgttcgcggcgtcgctggcgtacctgatgcggcggtggcgggagaagatccggtcgtcgacgccgctgcacgtggtggggctcgccgagatgctcgccatcttcggcctcgtcgcctcgctcatctacctcctcagcttcttcggcatcgccttcgtgcagtccatcgtctcctccagcgacgacgaggaggaggacttccttgtcgggcccgcccgtggctcctccgcggcggcggccgtcgcgccgcgcgcgccttcttctccggcgcagtgctcgctgctgggtagcccccacgacgatgccgcgcgggagagaatgccggaggaggacgaggagatcgtgtcgtcggtcgttgccgggaaggtcccctcctacgtgctggagaccaagctcggggattgccgccgcgcagccggaatccggcgcgaggcggtccggcggatcaccgggaggcagatcgaggggctcccgctcgacggattcgactacgcctcgatcctcgggcagtgctgcgagctcccagtggggtacgtgcagctccccgtcggcatcgccgggccgctcctgctcgacggccagcggttctacgtccccatggccaccaccgaggggtgcctcgtggccagcacgaaccgcggctgcaaggccatcgccgagtccggcggcgccgtcagcgtcgtgctccgcgacgggatgacgcgcgcccccgtcgcccgcctccccactgctcgccgcgccgccgagctcaaggccttcttggaggattctgtcaacttcaataccctctccatggtcttcaataggtacaacattcacccataaaccatactccctccgtcccaaataaaaaccatcaattgttcatattcatagccaagatgttttttttttgtttttttgagatgaatggcgtagatggcaatgtgctttttgattaatagctgactgctgcataagtctcattcgtcctattcaactgacttttgtgaattagtacggcaaatggtacaggattaatgctcctctccttttcgtgaattagtacggcaaatggcacaggattaatgctcttctcgtggtaccatacttcgctatgccactagttagcatcagttaattactggagtactagccaaagaaaatgatcgtccaactcatatttactcttaggttgtgtttggataatgggaaatgaggggtgggattaggattgggaaatgaatgaagggttaggattaaatggatgagggagaatgaatggttaagatttaaagaggggtgggaaatcatttcccttagacatttgccaaacactgccttagttgttgtatactagccaaccgaattcttatgtacatgtcgcaagttacaggtatggcgcaattattttgcaaaagaactcttatgaactatgacatgatgagtgaattgtactcaaaatttcaaatttgagcaggtccagtagattcgcgaggctgcaaggggtacaatgtgccatggctgggaggaacctgtacatgagattcagctgctgcacgggggatgccatggggatgaacatggtctccaagggcgagcagaatgtgctggattacctccaagatgacttccctgacatggatgttattagcatctcaggtaagcagctttgctcctctgcctcttttgcacaaataatccacaccagattctgctggtcatctggctataattttgtactgaacttaatacttgtacgaaaaaaaaacgctatcatagttgaaagagaaccatggcaagaatgttcgaataacaataagactgaacaaccttttggcaatatacaagtaagaagtaccttgaagatgacatcaaaatgctgaaatatgcgcatgttctctgcaactaagccctttaaaaccagatggttagtgagccaactcggcatgatgtagaatgatcaattacattacggcacacttgttcaaatgacaggatttagaaagtgacaggactttgaaagcttgctttattggtaaaaaaggcacattcttttacgcgcttggtctgatgacttcaattaatatacacattagctggaactttttctgaacttcatgcacacttgaatgttcaggagatagtttgctcaagaaaaaccaaaagagatgacatttgatgcaggcacgtaactgcatccttttgtttttagaatgctaacagctccagtgtattgtgcatatcttatttggctgtactagtatatactgacttcactaacttaacagagagcatataactcaacaatatgaacctgattagtaaaaccaagtgtgccctgtcaaatatccgaatacaacccaatgttcaatatcttctaataaatatatttattgttggaccggctgaatttattgaggttgagaaagggctacagggtacagacatgatcaacaacagggttgttggtctgaactctaggctgcacagcatcaggctgctctaaaccaggctgaaaatttctaccacattttcatgattcatgttcttccattaatcttaagcttatgaaaccaggtaacttttgctctgacaagaagccagctgctgtgaattggatcgaagggcgcggtaaatctgtggtttgtgaggcagtaatcaaggaggatgtagtcaaaaaggtgctgaagaccaatgtgcaatcgttggtagagctcaacgtgatcaagaatcttgctggttcagctgttgctggggctcttgggggtttcaatgcccatgctagcaatattgtaactgcaatcttcatagccactgggcaggatcctgcccagaatgtggaaagctctcactgcatcacaatgttggaagctgtaaatgatggcagagaccttcacatctccgttactatgccatcaattgaggtatgcatacaatatcattttttatagttaagcgttcagtatcaggttttgtgctgataacacactttacctaaaatatgttggcccctactttggtttttatttggcaagaaatgctctgcacgtttcttatggtccccaatgtgtgctaatgcttagcttgcacatcctttgccacgaattgttgaccgttttcgtttagcaaaactctgtccataatcaatgttggtatcatgcaaaattgatttactgccatctcagcctgcttgtccatggtgtccagtactgcaccccctgttaccacttgactctgatgaaatgtgttgaaaccaaattatataggctcaaatgtcttacctgacctccacgttatcgtagctctacagggtacagactgcgatatttcctattgttctacattcgctatacacggtcggcattctggctacggttacacttctccgtcagctcaatcagctgtttttatcagagaaatcttttccatgtcttctcaacgaaaaggaatctttcttgcttgattttcctagcaacccgctggctcaagcaggttttgaacgtaactctagtcgcttattgtgatgttgtgccttgtcaggatgaggtgggatcgcgtattctatccttcttcatgtttgttgtttgtttctgagagcatataccgacagtgtgctgcctaagatacttgcataatgacacttaaagcatgcatatcaggtacaaaaatgattaacatgttgcatttctttttgaaaaatgcaggtgggcacagttgggggagggactcagctggcgtcacaggctgcttgcttggacctgctcggcgtgaaaggcgcgaacagggaatccccgggatcaaacgcgaggctcctggccaccgtggtggcaggtggtgtccttgccggggagctgtccctcctatctgcactccgcgcaggccagcttgtcaagagccacatgaaatacaacaggtccagcaaagacatgtccaaggtgatttcctagtcctagtagttcgaggtttggatcgttgaattggaaagaaagaaagaaaaaatggatagattcagaatgaagtgaatttcatgtcctgtgaaatgggtggctttcttaagaggtcaagggctcatcaaacaaaagtgaaggacagtgaagtttacggtgacatcgtcatggctgctgatgctgatacaaacagttcttgttccgaggtttgtgctatttatttcttgatgtttggtggtattggccggtctgctgctgagtcatgaaaccggtcgttctccggcgtgctgtcatcgaccccattttacaactgggaggctaactttggtcttggtgttgataaacaataatgttgataaataggccatggttggtaggtactggactactggtggacgacgggcctccctcgttgcttcacgaagctgtccactttccagctttgctttagtaattactttcgctttgttttaatccttttttgagtagtttttctccattatttcctcgtcggtcagaactcagaaccctgtcgaagcttagtgatgtggtaattttgtaaaaaaagatgtgttgctaagtggctcctctccattgtgtatgaaactctctctgtttctttcctttttgtaccgattctctggctaattccgggatctgaatgaatggtcgagacgttgaagtgtcacactcttacgcgcctctatcatcatctccctcactagcatgtctggttttgctttaataatagaaattgtttatatctcgacagtggacatcgacatgttaactcggtgaacattcacattggcatgtctaagattgacgttgctcagttggtgtgctcatagtgagaggtagtgcgcgagcgtctagtcacaagtcacttgcaaggcattaacacgtgtgcagaaatacgtatgcatatgtgtgtagtggtatgtgcacacgcatccctgtcccttcaggaaacatttagcatatctaattggatgaacatttggcatgacgtggagaaaccgatcctcatgggccatggtcctcgggctcacctcagctctagtgatcctcgag

SEQ ID NO: 126 - DNA, 2440 bp, Cucumis melo
ctaacgcttctcttcctctattttttctttctctgttctcgccggagaaaaacatccccaatggaccgccggcgttctctccgaccaccgcgtcccaacgccgtacaggatgctgatgccacctgtaccttccgtcgggacgaacaagacgcatcggcggccgaccacttgaaaagagcatcgcctaaagcttccgatgctcttccccttcctctctacctcaccaacacaatcttcttcacccttttcttctccgtcgcttattatcttcttcaccgatggcgcgataagatccgaaactctacacctcttcacgtcgttacgctctccgaaatcgccgccattgtttctctcatggcttccttcatttatcttcttggatttttcggtattgactttgttcagtctttcatagcgcgttcctctcccgatgcctgggatcttgaagatgaaattgatcgaactcttctcatcgacaacaatcgctatgctgcacctcgttccgcgtctgctgtcgctttgccgtccaaagtggtcgacgccgaggctttgaatacaattccattgccggaggaggacgaagaggttgtgaaaatggttgtggatggttctgttccttcgtactcgttggaatcgaaacttggggatccgaaacgagccgcttccattcgccgtgaggcactgcagaggacgactggaaggtcgatccatggacttccatttgaaggattcgattatgagtctattttagggcagtgctgcgaaatgccggttgggtatgttcagattccggtgggaatagcgggacctttgttgctggatggattcgagtacaccgtgccgatggctacgacggagggttgcttggtggccagcaccaatagaggttgcaaagcgatctatgcgtctggtggagcaacgagcatgttgttgaaagatgggatgaccagagcgccggttgtaagatttgggagcgccaaaagagcatctgaattgaaatttttcttagaggatcctagtaattttgataccttggccgtcgttttcaacaggtctagtagatttgctaggcttcaaagtatccgatgctctattgctgggaagaatctttatgtaagattttgttgcagcacaggcgacgccatgggaatgaatatggtgtctaagggtgtccagaatgtccttgaatttcttcaacatgatttctcggatatggaagtcattggtatctctggaaacttttgtgctgacaagaagcctgctgccgtgaattggattgaaggacgaggaaagtctgtggtctgtgaggcagtaataaaggatgaggtggtgaggaaggtattgaaaaccagtgttgcgagtctagtagagcttaacatgcttaagaatctaactggatctgcaatggctggcgctcttggtggttttaatgctcattccagcaatattgtatccgctattttcttagcaactggtcaagatccagcacaaaatgtggagagttctcactgcatcactatgatggaacctgttaacaacggcagagatttgcacatctctgtcacaatgccttccattgaggttggtactgtcggaggtggaactcaacttgcatctcaatccgcttgtttgaatcttcttggtgtgaagggtgctagcaaagagtctccgggagccaactcaaggcttttagccaccattgtggctggctctgttcttgcaggtgagctatccctcatgtctgctatagcagctggacaacttgtgaggagtcacatgaaatacaatagatctagcagagatgtatcaaaacttgaatcataaaaggtattagatcaacaaaagggtgggatccagtagagatagaaataaaaggggaaaagatttggatctttttggtggaagtagcaaagaaaatatggcttctggctggtttacatgtgatttccagagactagcctagctggaaggtggcccccatcgaggaagacatacaacatggttggataaaactctttctgtggttcatctagacatattgtgtgcccccacgaagatattcggtgtgttatctttctgtttgttttgcaaagaaaagaaaaagaaaaaaaaaaagaataatttatatttattctcattcgttagccttcctgacatttgaaaaacttgatgattctcgttggtgttgttatctgtttgtagatttgtagacgatggtgggggaagagaggggcttagtttttatgtatgataattatgtttctttgtacgtattgctttggtcaagttatggtggtggttgttgtaaccttgttatggttgtaaaaccttgataacttcagattgtggttctaaaccattcactgtaaaaaaaaaaaaaaaaaaaaaaaaaaaaaaaaaaaaaaaaaaaaaaaaaaaaaaaaaaaaaaaaaaaaaaaaa

SEQ ID NO: 127 - DNA, 470 bp, Glycine max
gagggacgtgggaaatcagttgtttgtgaagcaatcatcaaagaagaagtggtgcagaaggtattgaagaccaacgtgtctgccctggtggagcttaacatgctaaaaaaccttgctggttctgctgtcgctggtgctcttggtgggtttaatgctcatgctagtaacattgtttctgccatctttatagccactggccaagatccagctcaaaatgttgagagttcccattgcataaccatgatggaagccatcaatgatgggagggaccttcacatctcagtgaccatgccctccattgaggtgacttggcccaccccatcttttcttagatattattactcttgtataattggttaattttccaattcaatagctaaggtttatatgattcattattgtgctctcaggtgggtactgttgggggtggaactcaacttgcatcccaatctgcttgcttgaatttactt

SEQ ID NO: 128 - DNA, 388 bp, Mus musculus
  misc_feature (1)..(388): n equals unknown
tgaggatcctgacactgaactgaagcgcgggcattgggttctcaaggactaacatgcaatctgtgaattaaaaatctcaatgcactgtctagtggaagatgaatggacatgatcagtgacacccctgcttggtttctggcgctttcagagacgtctgaggttctttgcatagagactcctcagatgtggaaactctggttctttccgtgctgtgttctggaaagatctcacgtggatggtaccggtgctctgagcaccacagatgtgagctacangttcgtttctgaaagctaccacaagctggaaactggtgatcagtgtggggctcacctctccgtgggttaaaaatggttttaaatgacactgtagctgacagaacttctgatct

SEQ ID NO: 129 - DNA, 1305 bp, Schistosoma mansoni
cgttcaagtaacaaagctggttttagaagtaaagtcgcctatgagttacgattatctgtgattatacacagtcgaaccttgagattgcatacgatatctttatcaagtgctaagctctttatttgggagtgataaagtcttaagacaagtacatatgggatactctattctaaaacataatagtaaaataagtatttggaaaaggtctcctgtgactcattctgcttctaactctatttctttggcaggctagtagacttcccactcctgtttactcattttagttcttgtactttaatccatttgcttttatttcatgttcattcttttaatttgttcttttgttctagattttagtatcaactggatttgaactgttcgcaattattcccatttacttacaggaaaaattgagtattcgtagattaggcaacgttttgctgcttgacaatttacctgtaggctttatattctgaggtataaatatgctcaaaatactaaatactgtactgttatttttcgattgtttttcaactggaacctttttcgtgctcttgatttacctctttaccagacttcgtacacatttgcttcatttttcgtcatcgaattgtcatttagatgtgataatttatcaaagccgtgccgttatcatttttcttgtagtatttgtatacttcattggtgttttgacatgtaaaataaacgataaaattttggtccatacaatgctgaggaataaaaggcagttaaatactctgttttatacacttatccttttcactttcgccctatgctcattatcctcagttttatttgtaccgtataccagttttgctatatttctactctccacctcggtcttcttgttattttcagacttgtctgtattttttattgtactggaggtaagctgttcgttttcaatttcaatcactttatttttagtactatttgttggaaattgaattggtgaattatgaacatgctaaacgccattgtttactcagtcatttattttcaaaccaattatttgtggatcatatgcttggtatgtttctaaaaacttcattgttcagcatcagtactacatcaaaatatgcatacttggaaagtatctttaaatgtactttgatggagcaaattatttacattatgattgtatttgttttcctaccatcatttatgaggatatttgcgtcgtatgcgaaaagaatgtacggtgaacaaaaagtgcttagtgtcgaagtcagtaatgttgaattttctctaacttcgtgtgttttggtttagtttgctttgata

SEQ ID NO: 130 - DNA, 933 bp, Schistosoma mansoni
caccttctgttgatagattcaaaacgagactggacctccacagtgtaacaaaatgaagggattaaaataggtcaaaagacctcctatccttattactgaagactgactgaaggcggcaaaaacaaagagttacgctgtaacggtattaggaatccttgcatgcgacgttaccaatgcgagtttttcttattgcagggcagcaaagagtaaacgtactggaagaagaggaacaagccttacgcaagctaaactttcagaacactggataaaactattttgtaataagttttccctttttgtaatcgaattgtgtctttcaattttaaaaatatatctgttgtgccagtacactgcgttcttactttagaggcatttaccggtcctgactgttgtgttgttgtttcagatctctcctgctcctaagttaacgctaacatataaaatcttacgacgcatcaggcaatatagtaacgcggagtacttcttcagatgttctttatgatgaggcttaggaattaaaatatccccaagaaccacatccttacatcactattagccagagaagaaatgctaccatcacagtatttcgctacagatgcttttcatctcagtcctttcgtttcatattctcaatgttcattcttctgtatcatcgtaagtacttcagtatttcacgttctcttcggttttctccgtcatgttaatgtggcattttgacttgtgctactcacgtctgacaggtccccgttgataatgacagactggatgatagttttaccagtcacatttgtcagtttagaacgaagattcgcgatgtggttcggtgcctttatttctaaagctaaaattcactagtgtatcctatttaaatcgaaacttatcgagtccagtggtaaatgtagtcagaaacactcagagtctacataatacatt

SEQ ID NO: 131 - DNA, 324 bp, Solanum tuberosum
aaacagagcacaagtactcaaaaattacaaatttggcaaaacaccggtgttcctatcggaaaatcaactaaatttacaatggacgttcgccggcgacctgttaagcctctatacacatctaaagatgcttccgccggcgaacctctgaaacaagaagtttcttctcctaaagcatcttatgcgcttccactcccattgtacctaaccactgggttgtttttcaccatgttttctctgttatgtattttcttctcgtaaggtggcgtgagaagatccgtaattctattcctcttcatgtggttaccctttctgaattgttagcta

SEQ ID NO: 132 - DNA, 325 bp, Solanum tuberosum
aaacagagcacaagtactcaaaaattacaaatttggcaaaacaccggtgttcctaccggaaaatcaactaaatttacagtggacgttcgccggtgacctgttaagcctctatacacatctaaagatgcttccgccggcaaacctctgaaacaagaagtttcttctcctaaagcatttgatgcgcttccactcccattgtacctaaccactgggttgtttttcaccatggttttctctgttatgtattttcttctcgtaaggtggcgtgagaagatccgtaattctattcctcttcatgtggttaccctttctgaattgttagcta

SEQ ID NO: 133 - DNA, 3800 bp, Candida utilis
  misc_feature (1)..(3800): n equals unknown
aaacgttgaacgcgaaacgaccaccaccgcgcagagctgtacgaaacacagcgaaaaagtagcgaaaaaaggccactatacacaaaaattgtcatcaactgntgcgctctcgagagaagttttcatcatcagatcaattgcaataacagcacattgttcaattaaccggacattccaagagcgttttttcctctgagaaatacatcgtgtgtcctgtggaacctgtgtgataaagaaactcgaacaaatttccgtgccagtttcccattccacggtcgaactgtctgtctttcattattttgttgagcttttcgaggggaagaaatatcaccagcgtacccagtgaacggagaattggtgtttatccacgcggcccaatcacaaacgagtatatattcatacgcagtgcagcaacccactttaccagtacacgctttgttgagagagtggactagtgacgataccgcaaaataaggcaaaaagaaggaaccgctatgaacagtgcacaaccattcaagccattggcctcgctgttggcgtttgttgggaggatctcagcgcgtcatccgatccacacgctcatcgtgtcatcagtgcttgccgccgtggcgtacctggcggtggtgcaacagtatatgagcaacgggttctcctacgatgaaccggcagcggttatgttctaccacggtgcaagcgcaaaccaacattggattgcagttgacgacttgagcaaagtcccagtggatgtggaccactacaacgttgtcccattccagttccgcagagctggcgagtacaaggagccggtgttatcaggaatcgttgagttggatgaggtgaagtttgttgtttctcagtctgatgccgctgagcaatggcaacagttgaccgctgaggacggcactgtgtggcgttcaagagcgtatcacggcaaactgggtaagtactctgacatggctgttggtgctttcaataaggtgttgaacttggtcagaggggccgaaacctttgacattgccctggtgacttgtgcgtacattgccatgttctatacactgtttaacctctttgctagaatgagggcagtcggctctaaggtttggctaggattgtcaactcttgtgtcctcgttctttgccttcttgtttgcactgtacatcaccacgagggtgttggatctttcaattcccttcctctctttgtctgaaggcattccgttctttgtcgcagtggttggtttcaacaacaagattttgttggcagagaaggttttgcaaaatcaactcaacgctcaatcatcgaagaacgatgctccaaccgttctgtatcaggcattaagggaacaaggcccattgctcttgcgtgatcacttgtttatgattactgcattcttgggatgctccttttacgcgtcgtacttggatggactgaagaatttctgtatattggcagctctcatcctagcattcgatatactcaccacctctaccttcctatctgcaatcttatcactcaagctggaaattaaccaaatacacagatcaacgttgctgagagaacaactcgaagatgacggcttaactgaaaccacagttgatgatgttctcaaatccaatagtctcgctggaactaagactttcacagatgccccatctactctggttacagttgccaaggttgctggtgtttcagtcttctttggattgcacttttatggatttggatctgcttggctatccgatttgagcgctggtaatgagacaaatgacactttcaccttatacgatgcggtcgcagatcaaattcctattggttcaaacggtaccttggttactttattcccaacacgttttttcctccctgaaaaactatccacacaaattgaagccgtggttctatcattcattggtcttatttcaactgctgcccgtgataaatacatctcaaaattcattctctttgcatttgccgtttctgcatccatcaacgtctaccttttgaacgttgcccgtatccataccacaagattggaggatgcaatcgaattgaaaaagccaaagaagaaagcttcgaagacagctgtcagtgttcctaaagctgttgtggttaaagattcagaaactacaaaatcctcggaaatcttgcactcatcttctgagagtgaatctgagcaatcttcacgtccacttgaacaagttattgagttatacaaggatggtaaagttaagacccttgttgacgatgaagttgtatcccttgttactgctggtaagttaccactgtatgctctagagaaacaattgggtgataacttgagagccgttgctattcgtcggaaagccatctctgatcttgcagatgctccagtcttgagaagcaataaattaccatacttgcactatgattacgatcgtgtatttggtgcatgttgtgaaaatgttatcggttacatgccattaccagtcggtgtcgctggtccattgattattgatggcaagccgtaccatattccaatggcaaccacagagggttgtcttgttgcttctgctatgcgtggttgtaaagccattaatcttggtggcggtgtaacaacggttttgactaaagatggtatgacgcgtggaccatgtgttaaattcccaagtttgaaacgagcaggtcaatgtaagctatggttggactccgatgagggccaagaagaaatgaagaaagccttcaactctacttccagatttgccagactccaacatttgcaaactgctcttgcgggtgacttgttgttcattcgtttcagaaccgtcactggtgatgctatgggtatgaatatgatttccaaaggtgttgaatatgctcttaaacaaatgacggaggtgtttggatgggacgatatgatggttgtttctgtttctggtaactactgtaccgataaaaaaccagctgctgttaactggatcaatggtcgtggtaaaagtgttgttgccgaggcttccataccaaaggatgctgtggttaaagttttgaaaagttctgttaaagctgttgttgatgttaatgtcaacaagaacttgatcggatcagctatggctggtagtgttggtggtttcaatgcccaagctgctaatatggttaccgcagtttatttggctttgggtcaagatccagcccaaaacgttgaatcttccaactgtattacactaatgactgaaacggaggacggagatttgaaagtttctgtttccatgccatctattgaagtcggaaccattggtggtggtaccatcttggacccacagggatccatgcttgaacttctcggagtacgtggaccagctgatgttccaggagaaaatgcccgtcaactggctaaaatcgttgcatctattgttctttccggtgaattatcgctagttagcgcacttgcagctggtcatttggtgcagagtcatatgcagcacaacagagccgctgctaagaaataagcatacgactcaccaccttgttttatatcatgatgcttgctatgtatttcttatggacttgtttcgaccacccttccttggcatccaattttctcttcatcatattgcattgtggttgtaaatactaaaactcaacaatgtctactctaattataaaagttattttggaaacaatcaccatgttgtacaagatgtaaaattatgaactattcgtgtattgaacaaccttttcaatttcttacaacgtcaagtattatataaaaacacaaactggttaagagtactgatgaacgatcctctacgccggacgcatcgtggccg

SEQ ID NO: 134 - DNA, 438 bp, Mus musculus
ggaactctggttctttccgtgctgtgttctggagagatctcacgtggatggtaccggtgctctgagcaccacagatgtgagctacagttcgtttctgaaagctaccacaagctggaaactggtgatcagtgtggggctcacctctccgtgggttaaaaatggttttaaatgacactgtagctgacagaacttctgatctttatttattcagtctgggttgtagaactttgcaatctaagtttattttttgtaaactaataattcatttggtgctggtctattgattgggggcctacttcttcatggaagaattacttttattctcaaactacagaataatgtgctaagtagtgctaaatagttcttgacgaagaaaacagtcactgcatttatctctgtgagtctttgttcagagaggcctttagtctagattctgcc

SEQ ID NO: 135 - DNA, 4233 bp, Gossypium hirsutum
tccttatgctttataaaaattgaaaaagttagtacgattggataaacttgttaaaattcatcaaatcgaagacctagacatcaaaatttcaacaataaataggcaagaaattagtgaaaaatcaccacttcaacaaattaattcaataaatcgacctatttaccaatgattggattaatttctcatctttgtaaataagaggatcaaattatgtcaaattaaagcacaaattctaacttctcagttttcataaagtatagggatggaattctaaattaaacctttttaactcaaataagtaaatggattaaattccagaaattaaaaacagaaaaattaaatttcaaaagtatgaaaataaaaaggactaggtgcaaattagaccttattgtcttaaacacccaaactaaaaaccatgcacttgcaaaaaaagacagccttcaagctcttttgagttcatctcataccattgttcagttgcacagctgtcacacgtgccaacacctgtctcttactcacgcgccattcctttatatcatacgctctcatccacatatcttcattactcgacacgtgtcctcccaaaacaacgctataaagaaatagttttccctatttttccctcaattccgtttctccttagaacgtagcggaactgtctcgcaccctctcgttttcacattttcctattttatgctctcatcctccgccgtgccttccgcgtcggcttccttcaccaccgccatcaatggagacccaccggcgatcttcgactaattccattcggtctcacaagccggcaaggccaattgctttggaagatgattccaccaaagcttctgacgcattgccacttcctttgtatttaacgaatgctgtgttcttcactctctttttctcggcggtttatttccttctttgccgttggcgggaaaagatccgatcctctacgcctctccatgtcgtcaccttttccgagatcgttgcgattcttgcttccgttgcgtcgtttatttaccttttggggttctttggtatcgatttcgttcaatctttggttctccggccatcggctgacgtttgggctactgaagatgatgaagtggaaagtgaagttttgcttcgtaatgaagatgctcgtcacgttccttgtggacaagcacttgatcggtcgattcgatctttgcaacctccggaacctattgtaactgctgagaaagtgttcgatgaaatgcctgtgacagttatgactgaggaagacgaagaaataattagatccgttgtttgtggaatgactccttcatattctttggaatctaaattagatgattgcaagagagcagctgcgatcaggcgtgaggctttgcagagaataacagggaagtcattatcaggattgcccttggatggttttgattatgagtcgatattgggacagtgttgtgagatgccggttggttacgagcagattcccgtgggcattgctgggcctttgttgcttaatggaagagaatactcggttcccatggcaaccaccgaaggatgcttggtagctagcactaatagaggctgtaaggctattcatttgtctggtggagctacaagtgttctattgagagatgggatgactagagctcctgttgtgaggttcggtaccgcaaaaagggcggctgatctgaagttgtatttggaagatcctgaaaatttcgagaccttggcttgtgtttttaacaggtttttttccttcgaattcttggtttaataatttgtattcaagttaatattgttgcttgtttgtctaagagttttgggtatttttgagttattgcagatcaagcagatttgctaggcttcaaagcatcaaatgtgcaattgcagggaagaatctgtatttaagattctcatgctttactggtgatgctatggggatgaacatggtttccaagggagttcaaaacgttttagatttccttcaaaccgatttccctgacatggatgtcattggcatctccggtgagtctctttttaatggatttataattatgttcctgttaaaatgtgcctatagttcctgtacttttcaaaaattaggaatttggtcctacttttcagatttcaaaaacattattattattttggttaaatttcttgctattacattttgaaataaaaaaaatactcatttggtagctatataataagaaaagatgttgtaattaaaaatattattaacagttaaacttgaattttgaaatatgaaaagtaggaataatttcctgaaaatacaagttcagggactaaattcctaattttcattgtttgagcttaagatcgttgaattttattgatttatgatggatataggaaacttctgttccgacaaaaagccagctgcagtaaattggattgaaggccgaggcaaatctgtcgtctgtgaggccatcattaatggtgatgtagtgacgaaggtcttgaagacaagtgtagaatctctcgtggagcttaacatgcttaagaaccttactggttctgccatggctggagctctgggtggatttaatgctcatgccagtaacattgtcactgctgtctatatagccactggccaagatcctgcccaaaatgtcgagagctctcattgcatcaccatgatggaagctgttaatggcggcaaggaccttcatgtctctgtcacaatgccttccattgaggtaattgattgtgttgctcgggttttcactatcgaaattatcaggcatagtaaaaatatcatacaacttatgcccgatatatgacctctaggtacgctctaaatgcatctaacacgagaatgagatattaaatgcattgacatgagtacaagacatgatcctcaagtacactcgagtaaattagtcattctcctagaaaagtgagctatttagtattggtacattgaaacggttaatgatggtaagattgaacgacttgtcgaagtgaaaaaaatgatcaaactactttttaactgttattgtctttttaagggttaaattacttttttgggtttgaacttggctactattctcatgttggggcttaaagtttttttggtctaaatcagtctttgaacttgacaattgttctatatttgacctaatttttttttcaagttagtttctgatatttttcttagaaaccctaaagctcaagtctcaatatgggaaaatttaccaagttcaaggactaatttggataaaaaaaaggttcatgactcaatgtgagaagaattatctagttcaaagattaatttggataaaaaaaggttcaagctctagtgtcaggacagtaacttggttcaggtctgaatacgggaacaagaccagaaaaagttcaagcttgatataagaattgttgccgcggatccaaataatgatttaacactctttagtttatggtacaagaattagtcagctccaaattttagaattctccatacaggtaaaccttggaaaaaaggttaagatatccgtatcttgcctaataattttatattgttatgtgatttatcttcataggttggcactgttggtggtggaactcagcttgcatcacaatcagcttgtttgaaccttcttggtgtcaagggtgcaagcaaagaatcccctggagcaaactcaatactccttgcgactatcgtagccggtgctgtccttgccggcgagctgtcactgatgtcagcacttgctgccgggcaactagtgaaaagccatatgaagtacaataggtctagcaaggatgtttccaaggtttcttcctaaatttgatgaaaaaaatgaccttggcgtctgtcaaagcctgaaaaatttggtgtaaagttggaagctgaaagagagacatcatcatctcttagtaataagctaagtagacttgcatgtatttgtaatttacttatatttatttttgtattttgtttttgttttgtttttaaaatttttcttaagtaagtcaatgtaatctgaggtcttagatttgtgtaaaatgacaggattgttattagcattttgtttcttttggctttctcttggttgagaaatgagttaattgcacacatccctaaattatgaacttcattttaaaattatgaacttcattttaaattggtcactaaattttttattttttattttaaattatgtcatataaaagtttgatgcttgatttaaattaataaattttttatgtaataggattttt

SEQ ID NO: 136 - DNA, 574 bp, Mus musculus
ggttgacgtaaacattaacaagaatcttgtgggctcggccatggctgggagcataggcggctacaacgcccacgcagcaaacattgtcactgctatctacatcgcatgtggccaggatgcagcacagaatgtggggagttcaaactgtattactttaatggaagccagtggtcccacaaatgaagacttatatatcagctgcaccatgccatcgatagagataggaaccgtgggtggtgggaccaaccttctacctcagcaagcctgcctgcagatgctaggtgttcaaggagcatgcaaagacaatcctggagaaaacgcacggcagcttgcccgaattgtatgtggcactgtgatggctggtgagctgtccttgatggcagccttggcagcaggacatcttgtcagaagtcacatggttcacaacagatcaaagataaatttacaagatcttcaaggaacgtgcaccaagaaggcagcttgaggatcctgacactgaactgaagcgcgggcattgggttctcaaggactaacatgcaatctgtggatttaaaatctcaatgcactgtctagt

SEQ ID NO: 137 - DNA, 622 bp, Mus musculus
attcgtcgacatggtcagaagtcacatggttcacaacagatcaaagataaatttacaagatcttcaaggaacgtgcaccaagaaggcagcttgaggatcctgacactgaactgaagcgcgggcattgggttctcaaggactaacatgcaatctgtgaattaaaaatctcaatgcactgtctagtggaagatgaatggacatgatcagtgacacccctgcttggtttctggcgctttcagagacgtctgaggttctttgcatagagactcctcagatgtggaaactctggttctttccgtgctgtgttctggaaagatctcacgtggatggtaccggtgctctgagcacacagatgtgagctacagttcgtttctgaaagctaccacaagctggaaactggtgatcagtgtggggctcacctctccgtgggttaaaaatggttttaaatgacactgtagctgacagaacttctgatctttatttattcagtctgggttgtagaactttgcaatctaagtttattttttgtaaactaataattcatttggtgctggtctattgattgggggcctacttcttcatggaagaattacttttattctcaaactacagaataatgtgc

SEQ ID NO: 138 - DNA, 161 bp, Schistosoma mansoni
ttttgacgttcaactgggagcaggaacgacctgaaacaacaacagaacagtcaggagcgcgcacgacgcacttcctgggtaaaagcaaacttacaaaagttggaggacaccctgacttgtacctcataacctaccactaatacgtccttcatgccagattt

SEQ ID NO: 139 - DNA, 2214 bp, Solanum tuberosum
cattcctccattttcctctgtaaattccggcgaccggaaaagtttcacgatggacgttcgccggcgacctgtaaaacccctttacccttccgaacacatttcctccggcgaacctctcaaaccccataatcaagattcctctgttaaagcttcagatgctctgccattacctttgtatcttacaaatggtttgttcttcaccatgtttttctctgtcatgtattttcttctacacagatggcgtgagaagatccgtaatggaattccactccacgtgcttaacttttctgaattagttgctatggtttcgttgatcgcttcggttatttatctgttggggttctttggtattgggtttgttcaatctttcgtttctaagggaaataatgattcttgggacgttgaagatgaatccccagaacaatttattgatagaactgttacaccaccacctgttcgacgaaatatcccaatgaaatctgtacctgttgctgaaaaaactgctcagataatcacaccattttcgtcagaggacgatgaggtggttatcaaatcggtggtggaagggagaataccatcatattcattggaatctaagttgggcgactgtaaaagagctgcttttattcgaaaagaggcgttacagaggagttcagggaagtcattggaagggttaccattagatggatttgattatgaatcaattcttggacagtgttgtgagatgccaattgggtatattcaaataccagtgggaatagctggacctttgctgcttaatgggaaagagttttctgtgccaatggcaaccacagaaggatgtttagttgctagtactaacaggggttgtaaagccatttatgtttccggtggcgctacgagtgttttgttcagagatgcgatgactagagctcctgtagttaggttcggaagcgcaaagagagctgcagagttgaagttcttcgtcgaggatccaatgaattttgagactctatctgttgttttcaataaatcaagcagatttgctagattacagaacattcaatgtgcaatagctggaaagaatctatacatgaggtttagctgtagcactggtgacgcgatgggaatgaacatggtttccaaaggtgtacagaacgttcttgattaccttcagaatgagtaccccgacatggacatcatcggcatatctgggaactattgctcggacaagaaaccagcagcagttaattggattgaggggagaggaaagtcagtagtttgtgaggcaatcatcaaggaagacgtggtgaagaaagttctgaaaactgaggttgctactctagttgagctgaatatgcttaaaaacctcactggctctgccatggctggtgcacttggtggcttcaacgcccatgccagcaatattgtctcagctgtatatttagccactggccaggacccggctcaaaatattgagagctctcactgcatcactatgatggaggctgtaaatgatggcaaggacctccatatttcagtcaccatgccttcaatcgaggtgggtacagtaggaggaggaactcaattagcatcgcaatcagcttgcttgaacttattaggagtgaaaggtgccaacagagaggcaccagggtcaaatgcaaggctcttggctacaatagtagcaggttcggttctcgcgggtgagctatccctcatgtcagctatctcagctgggcaacttgttaagagccacatgaaatacaatagatcatgcaaagatgtcacaaagtaataatatgcaacaacacagctaatttctccccatcttaatgtttcaaaattgtatagattttattattcccaacaagcaactttcttgaagtatatataatcatcatcatcatctttgaaataaaggattataataccaaatctaggaaataataatatcatattattagagacaagatgatctgtatgctgtgttgtatttattaatatgcaaatgttttttaaaaaaaaatactatgtggggagaaggtagttggtatcatcattaagtttcaatttgtgtcaaggtggatgaccttataatgtctttaattttgtattttcttttgtacttgttattactttgtaatttattgccaaaaatcaaaatggcatctcaatattggtattgttttgatctgcacagagtgttgtatctttttaaataaatttctttcatta

SEQ ID NO: 140 - DNA, 2019 bp, Solanum tuberosum
tgtcaatcatatatcccctccccccccgccaccacacactttcttctcctctttttcctccttcacttccccaccggggggagacttaccggtgaaaaatggacgttcgccggagatctgaaaagcctgtttatccatcgaaggtctttggcgccgatgaaaaacctctcaaaccccacaataatcaacaacaagaggacaacaatacccttctcattgatgcttccgatgctctcccacttcctttgtatctcactaatggcttgtttttcaccatgtttttctctgttatgtattttcttctatcaaggtggcgtgagaaaatcaggaattctacacctttacacgtggttacgctttctgaattgggtgctattgtttcgttaatcgcttctgtgatttatcttctcggtttctttgggattgggtttgttcagacgtttgtgtcaagggggaataatgattcatgggatgaaaatgatgaggaatttctattaaaggaagatagtcgttgtggacctgcaactactcttggttgtgctattcctgcaccacctgctcgacaaatttccccaatggcaccacctcaacctgctatgtctatggtagagaaaccttctccgttgatcacaccagcttcgtctgaggaagacgaagagataattaactccgtggtgcaggggaaattcccatcatactcattggtaatccagctaggtgatgtcagcgccgctgcgtcgttaaggaaggaggtgatgcagaggatcacagggaagtctctagaagggctaccattggaaggatttacctatgaatctattcttgggcagtgttgtgagatgccaatcgggtacgtgcagataccggtgggaatagcaggcccattgttgctcaatggaaaggagttttcagtgcccatggcaaccacagaaggatgtttagtggctagcaccaataggggttgcaaggctatctatgcttctggtggtgctacctgcattgtgctccgtgatgggatgactagagcaccatgtgtcaggttcggcacagccaaaagggcagcagagttgaagttctttgttgaagatcccatcaaatttgagacacttgctaatgtattcaaccaatccagcagatttggcagattacaaagaattcagtgtgcaattgctggaaagaatctgtacatgagatttgtatgtagcaccggtgacgcaatgggaatgaacatggtgtccaaaggtgtacaaaatgttcttgattaccttcagaatgaatatcccgacatggatgtcatcggcatatctgggaacttttgctcggacaagaagccagcagcagttaattggatcgaggggagaggaaagtctgtagtttgtgaggcaattatcacagaagaggtggtgaagaaagttctgaaaactgaagttgctgctcttgtggagctgaacatgcttaaaaatcttactggctctgccatggctggtgcccttggtggtttcaatgcccatgccagcaatatcgtctcagctgtgtttatagccactggtcaggatccagctcagaacatagagagctcgcactgcatcactatgatggaggctgtaaatgatggcaaggacctccatatttctgttacaatgccttccattgaggttggtaccgttggaggtggaactcagcttgcatcacagtcagcttgcttaaacttgttaggagtgaaaggtgccaacagagaggcaccagggtcaaatgcaaggctcttggccacagtagtagctggttctgttcttgctggggagctatccctcatgtcggctatctcggctgggcaactagttaatagccacatgaaatacaatagatctaccaaggcatcctcctaatcaggggaatacaatacaatacaatccattctccccgcttgtatttgaaggtgtagtacacaggtagcttccatttatgaatgatcgatcgatattaggaataaataaatttacaaccccaaaaaaaaaaaaa

SEQ ID NO: 141 - DNA, 441 bp, Mus musculus
ctttttctgacgtagatcaaagataaatttacaagaacttcaaggaacgtgcaccaagaaggcagcttgaggatcctgacactgaactgaagcgcgggcattgggttctcaaggactaacatgcaatctgtgaattaaaaatctcaatgcactgtctagtggaagatgaatggacatgatcagtgacacccctacttggtttcatggcgctttcagagacgtctgaggttctttgcacagagactcctcagatgtgggaactctggttctttccgtgctgtgttctggagaggtctcacgtagatggtaccggtgctctgagccacacagatgtgagataaagttcgtttctggtagctaccacaaactggagactggtgatcagtgagaggatcacctctccgagaagataaaatgagtttaacatggcaatgtagctga

SEQ ID NO: 142 - DNA, 408 bp, Mus musculus
agcaccacagatgtgagctacagttcgtttctgaaagctaccacaagctggaaactggtgatcagtgtggggctcacctctccgtgggttaaaaatggttttaaatgacactgtagctgacagaacttctgatctttatttattcagtctgggttgtagaactttgcaatctaagtttattttttgtaaactaataattcatttggtgctggtctattgattgggggcctacttcttcatggaagaattacttttattctcaaactacagaataatgtgctaagtagtgctaaatagttcttgacgaagaaaacagtcactgcatttatctctgtgagtctttgttcagagaggcctttagtctagattctgccagctgtgccacactctgcactaaagatatcagag

SEQ ID NO: 143 - DNA, 3162 bp, Schizosaccharomyces pombe
atgatttataaacttgctgctcggtatccaattcaagtgattgccattgtgggcatccttgtctctatggcatatttttccttcttggaagccttaactcaagaagatttcccagtattaattcgtgctttaaaacgatttggtattttggatggatttccgaacactcgtctacctaacgagatgattttaaagctaagtagtgtccaaggtgaggatgcctcggtttgggaacaaattcctgccgcagagttgggtggagaaggatttgttgattttgatatcacccaatggtattaccctgcgaatgcaaaggtcgatgttgctcaattggtagagccatatcgtaatgactgcattttccatgacgcttccggtgcttgccatttcttttttaaagaggtcggcaattggactgtatctagtattgcattaccatcgaatctcgccaatccgcccatcgattacttccttgacagttctagtactgtcattcaaagaattcttcctgcaattcgtgaacacggcatttcatggtcgtggttacttcagttgatcgctcgcacttggatgaatactttaaagatcgctagccaagcttctaagaccgaactgttaattgttggtactgcttatgcttgcatgttgatatccattgtgtctctttaccttaagatgcgtcgtctaggatccaaattttggctattttttagtgtcctgctttccactttgttctctgttcaattcgcaatgactttggtacgtgcatctggtgtacggattagccttgtctcgttgattgaaagtttgccttttctgataaatgtggttgcccttgataaagctgcagaattaacgcggcaagttatcactcgatgctctgtctctgactcccattctcctatgcatgaagatattgcaaaggcttgccgcaacgctgcaccgcctatcctccgtcatttttcttttggaatagtcgttttggcaattttttcgtattgtaattttggtatcaaacaattctttttgtttgctgctgtcatgatttatgatttactcttactgttctctttctttgtcgccatactcaccctgaaacttgagatgcgccgctataatgctaaggatgatgttcgaaaggttcttatagaagagggtctctctgagtctacggctcgtcatgttgcagacggcaacgattcttcggctactacttctgcagggtcacggtattttaaagttagatatggaaccaaaatcattcttttcatattcattgccttcaatttgtttgaactttgttctattccgttcaaacattatgctgccacttctgctgctgctgctcgattaattcctcttgttcgctctcaatatcccgattttaagtcacaaaggcttttggatgatggagtgtttgacgacgttctttctgctatttcttcaatgtccaacattgaatcaccaagcgtccgtttactaccagctgttttttacggtgccgaattatccagcacttcttttctatctactatccattcgtttattaacaactggtctcactacatcagtgcttcgtttttgtcaaaatggatcgtctgtgctttatctttgagtattgccgtcaacgtttttcttttgaacgctgctcgattgaactccatcaaagaggaacctgagaaaaaggtggttgaaaaagttgttgaagtcgttaagtatattccttcgtcgaatagttcatccattgatgacattcagaaagacgaaatcgctcaagaatccgttgtacgttcgcttgaggaatgtatcactctttacaacaatggtcaaatttcaactttaaatgatgaagaagttgtgcagttaaccttagctaaaaaaatccctctttatgctttagaacgagtacttaaagacgttaccagagctgttgtaattcgccgaacggtcgtctcccgttcatctaggacgaagacacttgaaagctctaattgccccgtctatcattacgattactctagggttttgaatgcatgttgtgaaaacgttataggttacatgcccttgccccttggtgtagctggtcctctcattattgacggtaagcctttttatatccctatggctactactgagggtgcattggttgcttctactatgcgtggatgcaaagctattaacgctggtggtggtgctgttactgtattgactcgtgatcaaatgtcccgtggaccatgtgtggctttcccggatttgacgcgcgctggccgtgctaaaatttggttggatagccctgaaggccaagaggttatgaagaaggcttttaactctactagccgttttgctagacttcaacatattaagactgctctagctggtactcgtcttttcatccgtttctgtacgtctaccggtgatgctatgggtatgaatatgatttccaaaggtgttgagcatgcacttgtagtaatgagcaatgacgctggttttgatgacatgcaagtgatcagtgtatcagggaattattgtacagataagaagcctgctgctattaattggattgatggtcgtggtaaaagtgttattgctgaagctattattcctggtgatgctgtcaaatcggtattgaaaactactgttgaagatttggttaaattaaatgttgacaaaaacctcattggtagtgctatggctggcagcgttggaggatttaatgctcatgctgctaacattgtcacggcagtatatttagcaactggtcaagaccctgcccaaaatgttgaaagcagtaattgtataactttgatggataatgttgatggtaaccttcagcttagcgtgtcaatgccatccattgaagttggaacaattggtggtggaacggttttggaaccgcaaggtgctatgcttgacttgctcggtgtgcgaggtgcccatatgacctctcccggtgataattctcgtcaactagcacgtgtcgttgcagccgccgtaatggctggtgaactgtctttgtgttccgcacttgctagtggccatttagttaaatcccatatcggactcaatcgaagtgcgctgaatactcctgctatggactcttctgccaagaaaccagcgactgatgctctaaaatccgttaactctcgagtaccgggacgttga

SEQ ID NO: 144 - DNA, 3433 bp, Blatella germanica
ggccggtattaataaatttctatcatttgaaatgttgtaagtgtattaaaaattgccatgtggaaagattgaatgaaaatagcggagaacgttaagtggccgattgacgttctgtctccgctagctggttcgagtgagccggttagatcataatggttgggcggttgtttcgtgcacatggtcaattctgtgcctcacatccatgggaagtgatagttgcaaccctcacgctgacagtatgcatgctgacagtagatcagcggcccttaggacttcctcctggatggggacataattgtatcacactggaggagtacaatgctgcagacatgatagtgatgacattgatccgctgtgtggcagtcctttacagttactaccaattctgccatctccagaagctgggctcgaaatatattcttggtattgctggcctcttcactgtcttctccagttttgtcttcagttccagtgtcatcaacttccttggtagtgatgtttctgacttaaaagatgctctctttttcttcttactgctgattgatttatcaaaagcaacagttctggctcagtttgccctgagttcacgcagtcaagatgaagtgaagcacaacattgcaagagggatagccatgctgggtcccactattaccctggacactgtcgtagagacgcttgtcattggtgtaggcatgttatcaggcgtgcgtcgattggaagtactgtgctgttttgcctgcatgtcagttattgtaaattacgtggtgttcatgacattttatccagcatgtctatctctaatacttgagttgtctcgcagtggtgaaagtggtcggcctgcttggcatgacaaatcattgatcataaaggctcttcatgaggaagaccaaaaaccaaatccagttgttcaacgtgtgaaggtgataatgtcagcagggttgatgctagtccatgcacataggtgggtaagatgcctatctattgctctctggcctgacctgacctcgctccgctatttctgtacacattgtgatactggtgtttcttacagtcgctggtcttttgcaagcgaaggtgaggaattacccactgtgaaacttgtaactggcgactctgtggtaaattcaaacagtacagatgatgcacagcttcattattatattatgagatggctgacagtgagtgcagaccacattgttatccttattttgctgctggcactagctgtgaagtttgtattctttgaaacaagagacgagttgacaaccacaaggggcatggatggctgggtggaagtgagcagcccagtggaacacaagtatgttcaaacagaacaaccctcatgcagtgcaccagagcagcctcttgaggaacctcctgcttccaacaggagcattgatgaatgtctctcagtctgcaaatctgatgttggagcacaagcactgagtgattgtgaagtgatggcactcgtaacaagtggccatattgctggctatcaacttgaaaaggttgtgagaaaccctgagcgcggtgtggggatccggcgacagatacttaccaaaactgcagatttaaaggatgccctagataatttgccttacaaaaattatgactatttgaaagtaatgggagcttgttgtgagaatgtgataggatacatgcctgtgcctgtaggagtggcaggaccactcaatttagatggacgcctggtgcatgtgccacttgcaacaactgagggctgtctagtggcaagcaccaacagaggcatgcgagctttaatgcgatgtggtgtcacctctcgtattgtagctgatggaatgactcgtggaccggttgtgcgattccccaatattgacagagcaagtgaagccatgttgtggatgcaagtgccatacaattttgaacaaattaagaagaactttgactctaccagtcgttttgcacgtctttccaaaatccacataagagtagctggtcgtcatttgtttatacgcttcattgctacaactggagatgcaatgggaatgaacatgctctctaagggtacagaagtggctttggcatatgtgcagcaagtgtacccagacatggagatcctcagtttaagcggcaacttttgcactgataagaaaccagcagctgtcaactggattgaaggtcgaggaaagtctgttgtctgtgaagccattgtgccagctgacattataaagtctgttctgaaaacaagtgttcaagcactgatggatgtgaacattacaaagaatctgattggctcagcagtggcaggaagcattggaggtttcaatgcgcatgctgccaacattgtgacagcaatcttcattgcaacagggcaagatccagctcagaatgtgggcagcagtaattgcatgacattgatggaaccttggggggaagatggcaaagacctttatgtatcctgcaccatgccttctatagaaattggtactattggtggtggaacagttctaccaccacaggcagcatgccttgacatgctaggagtaagaggtgcaaatgaaatgtgtccaggagaaaatgccaatacattggcacgtattgtgtgtggcacagtccttgcaggagaattatctcttatgtctgcacttgcagctgggcatcttgtcaaaagccatatgcggcacaacagatcttctgtgagtacatcaggtagcgaacccagcacacctgcctgcaaatcatgaagtactttattggacagattattctgttaaattatttaaaaaacaaactttaaagttcacattttctcatatgtttcggtatagtcacacattgtgcaggcgtgtgtgtagttatcatcttccgtgttgtatgtttctgggccaaatgtgtgctgatgtgatgatttgttggtgcgatgatacaagctgctccgcactgacatccgcagagctgcacaagagcacaagacttataagagatctaaaatgcttttataaaacaacacacaacagacacaatgtggaaagatcaactcattctttctgataccattgaaacaaacatttaggaatcatcccttatatttgaggcaactaaatttcttccattccaatttattgccaatcctatgaattttgatctgtgatcactttgccccactcttgttcattaatattttttactgttcttggagacttgtgcacttaaattcattggatgaatgttaggtctcgtctgatcagtttgcaaaatgaactaatagctctatttgattgaaacagaacattatttagaagaattggttaaattaaataaaccagtattgtgaattatttagcaagagttctgatgtggactcaaagctactttccttttgcaaataatcaactcaattgtatacactaaataaattataatatatacaaaaataaaaaaaaaaaaaaaaaaa

SEQ ID NO: 145 - DNA, 831 bp, Sphaceloma manihoticola
atggccgcgggattccctggatacgcgctcgagaagacactcgaggacaagactagggcggtcaaaatccgcagagccatgattgcacggacaccagcgacaactaagcactctcgtctgctcgaatcatccaacctgccatatcaacatttcgactatgacagggtctttggagcctgctgcgagaacgtcattggctacatgcctctccctgtcggcgttgccggacccttgacgattgatggagaaagctacttcttgcccatggccacgacagaaggcgttctcgtagcgagcacttctcgtggttgtaaggctatcaacgcaggaggtggtgcggtcacagttcttactgcggacggtatgactcgtgggccttgtgttggttttgagactcttgcccgggcggctgctgctgcaaagctgtggcttgattcagaagaaggtcagaaagtcatgaaggatgctttcaactcgacttcgcgatttgcccgtcttcaacagctcaagacatctctggctggtacttatgtgtacattcgattcaagaccaccaccggcgaagccatggggatgaatatgatctcaaagggtgtcgagaaggctctagatgtcatggctaaggagtctggctttgaagacatggccatcatttccgtttccggcaatttctgcaccgacaagaaacccgctgctatcaattggatcgatggtcgcggcaagagtgtcgtggccgaggctatcattcctggtgacgtggtcagatcagttttgaagagcgacgtcaacgcccttgtcgagctcaacgtgtcgaagaacttgatcggtagt

SEQ ID NO: 146 - DNA, 2125 bp, Raphanus sativus
cgccatctcaccatctcaccatctactccttggatactcctctcaatggatatccgacggagacctcctaaaccaccggttaacaaccctaaccggttctccaacgacaacgacgatcaaccccggaccaaggcctcggacgcgcttcctctccctctatacctcaccaacgccgtcttcttcactctcttcttctccgtcgcctactacctcctccgccgctggcgcgacaagatccgccacagcacccctctccacgtcatcaccatcaccgagctcggcgcgctactcgccctcgtcgcctccttcatctacctcctaggcttcttcggcatcgacttcgtccagtcgttcatctcacgtgccgatacaaataacgagttcgaagaccaccgcctcgtcacgtgccttcccaggggcgacgtagaggtgtggtggtgtcacgtgccgatgcaaataacgagtttgaagaccaccgcgtcgtcacgtgcgcccaggggcggacgtagagtcgtggatcccacgcttccagaagaagacgaggagatagtaaaatctgtgatccgcggagtgatcccttcctactccctcgagtccagcctcggagagtgcaagagagcggcggcgatacggcgggaagcgctgcagaggatcacggggaggtcgatcgaagggttaccgttggaagggtttgattacgagtccatattagggcaatgctgcgagatgcctgtagggtacgtgcagatacccgtgggaatcgctgggcctttgttgctggatgggtgtgagtactctgtgccgatggcgacgacggaagggtgtttggttgcgagtactaatagagggtgcaaggctatgtatgtctctggtggggggacgagtacggtggttaaggatggtatgacgagagcgcctgtggtgaggtttgcgtcggcgagacgagcttcggagcttaagttttacttggaggatcttgagaactttgacacgttggctgttgtctttaacaggtcaagtagattcgcgaggcttcagagtgttaagtgcacactcgcagggaagaatgcttatgtgaggtttagttgtagcactggtgatgctatggggatgaatatggtatccaaaggtgttcagaatgttcttgagtttctcactgatgattttcctgacatggatgtcatcggaatctccggtaacttctgttcggacaagaagcctgcagctgtgaactggatcgagggacgtggcaaatcagtggtatgcgaggctgtgatcagaggagagatcgtgaacaaggtgttgaaaacgagcgtggctgccttggtggagctcaatatgctcaagaacctgacgggctctgctgttgcaggctctctaggtggattcaacgcacacgccagcaacatagtctcagctgtattcatagctactggccaagatccagctcaaaacgtggagctctcacagtgcatcacaatgatggaagccgttaatgacggcaaagatattcatgtctctgtcactatgccatctattgaggtggggacagtgggaggaggaacacagcttgcgtctcaatcagcgtgtttaaacctgctgggagttaaaggagcgagcacggagtctccggggatgaactcaaggacgctagcgacgatagtggcgggagcagttttggctggagagttatctttaatgtcagcaatagcagctggacaacttgtgaagagtcacatgaaatacaatagatccagcagagacatatctggagcaatgacagcgacaacaacatgatcattgtcatcatctgtgtggccaaaacttgaagaaggacaaaattctaaaaaagaggctcataactctctggtggacatctttgagccatgtgccttgcctttgccttcttttgttcaataaaagtttttttttctttttttttgggattaagggtgagaaagagagagggataatatctttcttctttctctaactcatggataattcatgttcttctttgatatatatgtcttagctttgtcgcgtgtttgttaggaaatggtgtttatatgataaaaaatgtatgcagttacgttttgggggcatgcacactcaggatttttct

SEQ ID NO: 147 - DNA, 4725 bp, Gibberella fujikuroi
gtcaatggctacttcaaatacccgccttttctccagatcttttcttcttccccggacttacacctgcgcttgagccaaaatcaatgtggtaaacgacatcgacgaatagcccttctaatcctcgaatcgtacccgatatcatggctgcgattctcctgccgcagcggttccgcggcgaagctcccgtcaccgaaaaaactacgccgtcatgggcctccaagcgacttacgcccatcgcccagttcctctcccgactcgcgtgctctcacccgaataacaacaaccgtcgtcgccgtcgccgtccttgcgaggcacctcatacgtcggccttctccaggagagcctcttcaacaccgatgttgaaagcgctactcttggcaaggccgattggtctaccctcgtggaaggcagtcgagtcctacgcgcagacctgaaactgcttggaactggaaggccgtcgagcaggatgtcgttgccgatgctggctcggatgccgaccaccttgccctcagggactcttgtcttccagcaggcctctgcggagtcctccagcactgctcctcgctctcaccacgtgcctatcccccagaacctgtctattacgtctcttccctctaccgagaatccgttcaccgcctactctcaggacagcatactcgcctacgctcttccctactctgagggtcccgagttccttgctgctgcccaagagattcccaacgaagatgccgtcgagattgagaccaagcacggacgcgagaagaaaacatggatcatgaaggctgccaaggtcaacacccgcaacagtgttgtcaatgggttagcaatgcctggagcgagttcctcgaccttctcaagaacgccgagactctcgatatcgtcatcatgcttcttggttacattgccatgcacttgacatttgtctccctcttcctctctatgcgtaagatgggttctaagttctggctcggcatctgtactctgttctcctctgtcttcgccttcctcttcggtctcgtcgtcaccacgaagctgggtgttcccatcagcgtcattcttctgtctgagggtctccccttcctggttgtcaccattggcttcgagaagaacattgttctcacccgcgctgtcatgtcgcacgccattgagcaccgacgaatccaggctcagaactccaagtctggcaagcgatctcccgacggttccacgcagaacatgatccagtatgctgttcaggccgccatcaaggagaagggtttcgagatcattcgcgactacgctattgagattgtcattcttgtcattggtgctgcttctggtgttcagggtggtctccagcagttctgcttcctggccgcctggaccttgttcttcgacttcatcctcctcttcacattctacactgccatcctcagcatcaagcttagatcaaccgtatcaagcgtcatgtcgatatgcgtatggcccttgaggatgatggcgtcacgtcgtgttgccgagaatgtcgcgaagggtgatgatgagctgaaccgcgtcaggggtgacgcccctctatttggccgcaagagcagcagcattcccaagttcaaggtcttgatgattctcggcttcatcttcgtcaacattgtcaacatctgctcgatcccattccgcaaccctagctctatgtccaccatccgaacctgggccagcagtctgggtggtgttatcgctcctctctccgttgaccccttcaaggttgcctccaacggtctcgatgccatcctgcctaccgccaagtccaacaaccgacctacattggtcactgtcttgactcccatcaagtacgagctcgagtacccttcgatccactacgctcttggttctgccgccagcaaccctgcctacaacgatgctttccaccatcacttccagggctacggtgtcggcggccgcatggttggcggcattctcaagtctctcgaggatcccgtcctctccaagtggattgtcattgcccttgctctcagcgtcgctcttaacggctacctcttcaacgttgcccgctggggaatcaaggaccccaatgttcctgagcacaacatcgaccgaaacgaacttgcccgtgctcgcgagtttaacgacaccggctccgctactcttcctctcggcgaatacgtgcctcccactcccatgcgaacccaacccagcactcctgctattaccgacgacgaggccgaaggtcttcacatgacaaaggctcgacctgccaacctgcccaaccgaagcaacgaagaacttgagaagctcttgtctgagaacgcgctgcgcgagatgaccgacgaggaggttatttctctgtctatgcgtggcaagatccctggttacgcacttgaaaagaccctcggtgacttcactcgcgctgtcaagattcgacgaagcattattgctcgcaacaaggcggccgccgacattacccactcgctcgaccgatccaagctaccttacgagaactataactgggagcgcttttttggcgcatgctgtgagaacgttattggatacatgcctcttcccgtcggtgttgctggtcctcttgtcatcgatggacagagctacttcatccccatggctactactgagggtgtcttggttgccagtgccagtcgaggttgcaaggccatcaactctggtggtggtgccatcactgttctcactgctgatggtatgactcgtggtccttgtgtcgctttcgagactcttgagcgcgctggtgctgccaagctctggcttgactctgaagctggtcaggatatgatgaagaaggctttcaactcaaccagtcgcttcgcccgcctccagtccatgaagaccgctcttgctggtaccaacctgtacattcgattcaagaccaccaccggtgacgctatgggtatgaacatgatttccaagggagtcgagcacgctctaagcgtcatggccaacgatggaggtttcgacgacatgcagatcatctctgtctctggcaactactgtacggataagaaggccgcggccctcaactggatcgacggacgtggtaagggtgttgtcgctgaggctatcattcccggtgaggtcgtccgcagcgttctcaagagcgatgtcgactctcttgttgagctcaacgttgctaagaacttgattggttctgctatggctggttcagttggtggtttcaacgcccacgctgccaacattgtcgctgctattttcctggccactggacaggaccctgctcaggttgtcgagagcgccaattgtatcaccatcatgaagaagtaagtttgtctcgcacatcaagtcggaaacatgctaacgtccatagcctcaatggagctctccagatctccgtctctatgccctcgctcgaggtcggaactctcggcggtggtaccatcctcgagccccagggcgccatgctcgacatccttggtgtccgaggctctcaccccaccaaccccggtgacaacgcccgccgtctcgcccgcatcatcggtgcagccgtcctcgccggcgagctttctctctgcagtgccttggccgccggtcatctcgtccgagctcacatgcagcataaccgaagtgccgctccctctcgcagcaccactcctggctcctcccatgacgcccgtctcactggccatgaccagtgcccaagagcgctcagcgtcaacaacgtcgatgagcgccgtcgctattcagaggtcaaagcgatagacgaataactttgcatttgaaggagtagaggcgagcgggtgataaaaagtttacatagacgagagcatgtatgagtatgatacactacacacatggtctgggatggagtgaatggtcacacagcatggagtttttgcattgaacattctggaaagatgaaagcatccatacatatatatacagccgccgaaagatggctattgaagatggtagttatgttagaagaccacttcgcaattcaattttaatccttttttgtgaaatcatgcatatgtcttcacccttgccactgcatctccatcaatggacgtgaactttatgcccttgtcctccatgcctttcttgcactcctcccacttgtcaagcatgactggctttgtcccttcgctgacaatccacgtcgtatacccctccttcagcgcatcctcggccgtagctttgacgcaaaagtctgctgccagccctaccacaaaaacatccgtgacaccctgctcactcaacatgcccgcgagtccactatcactcaccctaaacggatcataaaacgcactgtacatctccacccgctcatcctgccccttttcgataacggcatggacacgcgagacgtcagctcgggaccagctcacaccccgggtccttggacgcaatgtgttggcatacgttgtttcgtagctctgggaaggatctttggggtgctggattgttgtagttgatgtgtatggttgttgaagaggcgtgatttgaggcgaaagatatgtgggaaggtgggtggaagtcttttgttgcgaggatgagcaaaaggaggtggtaaggtggttattgggagctatgtgcgccttgaaggacgcaagagccgactgagagtagccttggaggtgggtggaagtcttttgttgcgaggatgagcaaaaggaggtggtaaggtggttattgggagctatgtgcgccttgaaggacgcaagagccgactgagagtagccttgg

SEQ ID NO: 148 - DNA, 1393 bp, Artificial sequence
  CDS
  misc_feature (1)..(1393): CDS
cagactattatgctgtcttcttggtgcaagcgccttgcagatcctgtaaattgatcttcgaacggttgtgaatcatatgagatttgacaagatgtccggccgccaaggcagccataagagacaattcgccggccattacggtcccacacacaattcgtgcaagttgccgggcattttcgccaggattatctttgcatgctccttgaacacccaacatttgcagacaggcctgctgtggaagaaggttggtgccaccacccacggtaccaatctcgatagatggcatggtgcagctgatatataaatcttcatttgtcggacctgaggcttccattaaagtaatacagttagaggatccaacattctgagctgcgtcctggccacaagcaatgtagatagcggtgacaatgtttgcagcatgagcgttgtagcctccgatgctaccagccattgcagagcccactaaattcttgttaatattaacctcaatcatagcctctgtggtagtctttaaaacttctctaacaaccttgcttggaattacagcttcacaaacaacagattttccacggccctcaatccaattgatagcagcaggtttcttgtcagtacaatagttaccactaacagccagaatctgcatttccggaaaatactcgtgaagcttggaaagtgctttctctgtgcccttagatatcatgttcatacccattgcgtcaccagatctggactggaaacggatataaaggttgcgtccagcgatactagtatgaagtttctgaaggcgcgcaaatctgctagtgctgtcaaatgcctccttgatcactgcgaacccttcggatgtttcgagccatgctttcacttctgcagagtcacaagcccttggaagacgcacaactgggccacgcgtcataccatctgcaagaactcgggagctggcacctccaccaagaccgatcgctctgcaacctctattggtgctagccacaagacaaccttctgttgttgccattggaacctggaattctttttcatccaagcaaagaggtcctgccactcccacagggatgggcatatatccaataacattctcacaacaggctcccatcaccaaagagtaattataatcgcgataaggcagatactggagagagctcggttcagaaagtttcttcgaaagtaactgtcggcgaatcgatacaccacgctcatgagtttccatcagagtctcgagcttgtaagctgggatatgtttagcattcactaactggatgatctcggcgtcactaaggaactttgcacctttctctgcattaccaaggatctgtagacattcttcattaggccgaggttcccgcggaagttcaatttcaggttcctgggtaaccagaac

SEQ ID NO: 149 - DNA, 354 bp, Artificial sequence
  CDS
  misc_feature (1)..(354): CDS
ctagactattatgctgtcttcttggtgcaagcgccttgcagatcctgtaaattgatcttcgaacggttgtgaatcatatgagatttgacaagatgtccggccgccaaggcagccataagagacaattcgccggccattacggtcccacacacaattcgtgcaagttgccgggcattttcgccaggattatctttgcatgctccttgaacacccaacatttgcagacaggcctgctgtggaagaaggttggtgccaccacccacggtaccaatctcgatagatggcatggtgcagctgatatataaatcttcatttgtcggacctgaggcttccattaaagtaatacagttagag

SEQ ID NO: 150 - DNA, 309 bp, Artificial sequence
  CDS
  misc_feature (1)..(309): CDS
agcttcacgagtattttccggaaatgcagattctggctgttagtggtaactattgtactgacaagaaacctgctgctatcaattggattgagggccgtggaaaatctgttgtttgtgaagctgtaattccaagcaaggttgttagagaagttttaaagactaccacagaggctatgattgaggttaatattaacaagaatttagtgggctctgcaatggctggtagcatcggaggctacaacgctcatgctgcaaacattgtcaccgctatctacattgcttgtggccaggacgcagctcagaatgttg

SEQ ID NO: 151 - DNA, 360 bp, Artificial sequence
  CDS
  misc_feature (1)..(360): CDS
agcttggaaagtgctttctctgtgcccttagatatcatgttcatacccattgcgtcaccagatctggactggaaacggatataaaggttgcgtccagcgatactagtatgaagtttctgaaggcgcgcaaatctgctagtgctgtcaaatgcctccttgatcactgcgaacccttcggatgtttcgagccatgctttcacttctgcagagtcacaagcccttggaagacgcacaactgggccacgcgtcataccatctgcaagaactcgggagctggcacctccaccaagaccgatcgctctgcaacctctattggtgctagccacaagacaaccttctgttgttgccattggaacctgg

SEQ ID NO: 152 - DNA, 371 bp, Artificial sequence
  CDS
  misc_feature (1)..(371): CDS
aattctttttcatccaagcaaagaggtcctgccactcccacagggatgggcatatatccaataacattctcacaacaggctcccatcaccaaagagtaattataatcgcgataaggcagatactggagagagctcggttcagaaagtttcttcgaaagtaactgtcggcgaatcgatacaccacgctcatgagtttccatcagagtctcgagcttgtaagctgggatatgtttagcattcactaactggatgatctcggcgtcactaaggaactttgcacctttctctgcattaccaaggatctgtagacattcttcattaggccgaggttcccgcggaagttcaatttcaggttcctgggtaaccagaac

SEQ ID NO: 153 - DNA, 1159 bp, Rattus norvegicus
  misc_feature (1)..(1159): n equals unknown
ccgattaggtccccaaaacgggggacgtccatggggatgaacatgatttccaagggtacggagaaagcacttctgaagcttcaagagttctttcctgagctgcagattctggcggtcagtggtaactattgcaccgacaagaaacctgctgccataaactggatcgaagggagaggaaagactgtggtttgtgaagctgtcattccagccaaggtggtgagagaagtattaaagagcactacggaagctatggttgacgtaaacattaataagaatcttgtgggctctgccatggctggtagcataggaggctacaacgcccatgctgccaacatcgtcactgccatctacattgcatgtgcccaggatgcagcacagaatgtggggagttcaaactgtattactttaatggaagcaagtggtcccncnnntgaagacttgnnnnncagctgnnncatgccgtctatagagatcggaaccgtgggtggtgggaccaaccttctacctcagcaagcctgcctgcagatgctaggtgttcaaggggcgtgcaaagacaatcctggagaaaatgcacggcagcttgcccgaattgtgtgtggcactgtaatggctggtgagttgtccttgatggcagcattggcagcaggacatcttgtcagaagtcacatggttcacaacagatcaaagataaatttacaagatctgcagggaacatgcaccaagaaggcagcttgagcatcctgacatacttgaactgaaacacgggcattgggttctcaaggtctaacatgaaatctgtgaattaaaaatgtcagtgcagtgtcttgtggaagatgaacgtgatcagtgagcctgcttggtttctggctctttcagagacgtctgcggtcctttgcaccagactcctcagacgtgggaactatggttctttccgtgccgtattctagaaagatctcatgtggatgtcatggtgctctgagcaccacagatgtgactgcagctcgtttctaaaagctgccacaagctggaagctggtgttttgacgaaatgatggatcttggtgatcagtgtggggctcacctccaatgggttaaaatggagttttaaatgacactgtagctgacagaactctcgatttttatttattcagtctgggcgg

SEQ ID NO: 154 - DNA, 2195 bp, Arabidopsis thaliana
acttatcacgccacctcaccacctctctcctactctcctctctctcccccctggagagattattcattccctccaatggatctccgtcggaggcctcctaaaccaccggttaccaacaacaacaactccaacggatctttccgttcttatcagcctcgcacttccgatgacgatcatcgtcgccgggctacaacaattgctcctccaccgaaagcatccgacgcgcttcctcttccgttatatctcacaaacgccgttttcttcacgctcttcttctccgtcgcgtattacctcctccaccggtggcgtgacaagatccgttacaatacgcctcttcacgtcgtcactatcacagaactcggcgccattattgctctcatcgcttcgtttatctatctcctagggttttttggtattgactttgttcagtcatttatctcacgtgcctctggtgatgcttgggatctcgccgatacgatcgatgatgatgaccaccgccttgtcacgtgctctccaccgactccgatcgtttccgttgctaaattacctaatccggaacctattgttaccgaatcgcttcctgaggaagacgaggagattgtgaaatcggttatcgacggagttattccatcgtactcgcttgaatctcgtctcggtgattgcaaaagagcggcgtcgattcgtcgtgaggcgttgcagagagtcaccgggagatcgattgaagggttaccgttggatggatttgattatgaatcgattttggggcaatgctgtgagatgcctgttggatacattcagattcctgttgggattgctggtccattgttgcttgatggttatgagtactctgttcctatggctacaaccgaaggttgtttggttgctagcactaacagaggctgcaaggctatgtttatctctggtggcgccaccagtaccgttcttaaggacggtatgacccgagcacctgttgttcggttcgcttcggcgagacgagcttcggagcttaagtttttcttggagaatccagagaactttgatactttggcagtagtcttcaacaggtcgagtagatttgcaagactgcaaagtgttaaatgcacaatcgcggggaagaatgcttatgtaaggttctgttgtagtactggtgatgctatggggatgaatatggtttctaaaggtgtgcagaatgttcttgagtatcttaccgatgatttccctgacatggatgtgattggaatctctggtaacttctgttcggacaagaaacctgctgctgtgaactggattgagggacgtggtaaatcagttgtttgcgaggctgtaatcagaggagagatcgtgaacaaggtcttgaaaacgagcgtggctgctttagtcgagctcaacatgctcaagaacctagctggctctgctgttgcaggctctctaggtggattcaacgctcatgccagtaacatagtgtctgctgtattcatagctactggccaagatccagctcaaaacgtggagagttctcaatgcatcaccatgatggaagctattaatgacggcaaagatatccatatctcagtcactatgccatctatcgaggtggggacagtgggaggaggaacacagcttgcatctcaatcagcgtgtttaaacctgctcggagttaaaggagcaagcacagagtcgccgggaatgaacgcaaggaggctagcgacgatcgtagccggagcagttttagctggagagttatctttaatgtcagcaattgcagctggacagcttgtgagaagtcacatgaaatacaatagatccagccgagacatctctggagcaacgacaacgacaacaacaacaacatgatctgaatctgaatcatcatcctctcaaagaaggacaacaatccaaaacaagggcaggctttttacaacgcattccaacctcaaaactcgctggtggacagattttagccatggtggcggtaatgcgtttgcccttttgttaaaataaaaaaactatttgttttgtttgtttgacttgatatctttttttgggattgaggattgagagagatagagagattttacaaactttctctctttctctctttctctctttctcatggataattcgtgtctctttgatttgtctaaggtttgtctttgtttgttaggaagtggtctatatgaacgaaaaatttgtgt

SEQ ID NO: 155 - DNA, 1394 bp, Artificial sequence
  CDS
  misc_feature (1)..(1394): CDS
catggttctggttacccaggaacctgaaattgaacttccgcgggaacctcggcctaatgaagaatgtctacagatccttggtaatgcagagaaaggtgcaaagttccttagtgacgccgagatcatccagttagtgaatgctaaacatatcccagcttacaagctcgagactctgatggaaactcatgagcgtggtgtatcgattcgccgacagttactttcgaagaaactttctgaaccgagctctctccagtatctgccttatcgcgattataattactctttggtgatgggagcctgttgtgagaatgttattggatatatgcccatccctgtgggagtggcaggacctctttgcttggatgaaaaagaattccaggttccaatggcaacaacagaaggttgtcttgtggctagcaccaatagaggttgcagagcgatcggtcttggtggaggtgccagctcccgagttcttgcagatggtatgacgcgtggcccagttgtgcgtcttccaagggcttgtgactctgcagaagtgaaagcatggctcgaaacatccgaagggttcgcagtgatcaaggaggcatttgacagcactagcagatttgcgcgccttcagaaacttcatactagtatcgctggacgcaacctttatatccgtttccagtccagatctggtgacgcaatgggtatgaacatgatatctaagggcacagagaaagcactttccaagcttcacgagtattttccggaaatgcagattctggctgttagtggtaactattgtactgacaagaaacctgctgctatcaattggattgagggccgtggaaaatctgttgtttgtgaagctgtaattccaagcaaggttgttagagaagttttaaagactaccacagaggctatgattgaggttaatattaacaagaatttagtgggctctgcaatggctggtagcatcggaggctacaacgctcatgctgcaaacattgtcaccgctatctacattgcttgtggccaggacgcagctcagaatgttggatcctctaactgtattactttaatggaagcctcaggtccgacaaatgaagatttatatatcagctgcaccatgccatctatcgagattggtaccgtgggtggtggcaccaaccttcttccacagcaggcctgtctgcaaatgttgggtgttcaaggagcatgcaaagataatcctggcgaaaatgcccggcaacttgcacgaattgtgtgtgggaccgtaatggccggcgaattgtctcttatggctgccttggcggccggacatcttgtcaaatctcatatgattcacaaccgttcgaagatcaatttacaggatctgcaaggcgcttgcaccaagaagacagcataatagt

SEQ ID NO: 156 - DNA, 354 bp, Artificial sequence
  CDS
  misc_feature (1)..(354): CDS
gatcctctaactgtattactttaatggaagcctcaggtccgacaaatgaagatttatatatcagctgcaccatgccatctatcgagattggtaccgtgggtggtggcaccaaccttcttccacagcaggcctgtctgcaaatgttgggtgttcaaggagcatgcaaagataatcctggcgaaaatgcccggcaacttgcacgaattgtgtgtgggaccgtaatggccggcgaattgtctcttatggctgccttggcggccggacatcttgtcaaatctcatatgattcacaaccgttcgaagatcaatttacaggatctgcaaggcgcttgcaccaagaagacagcataatagt

SEQ ID NO: 157 - DNA, 309 bp, Artificial sequence; identical to SEQ ID NO: 150
  CDS
  misc_feature (1)..(309): CDS

SEQ ID NO: 158 - DNA, 1227 bp, Human
tggtcccctatcgcctccgcctagcagctgccatcggtgcgcccccacagctctaggaccaataggcaggccctagtgctgggactcgaacggctattggttggccgagccgtggtgagagatggtgcggtgcctgttcttggccctgcagagagctgtgggcggttgttaaggcgaccgttcgtgacgtagcgccgtcaggccgagcagcccccaggcgattggctagacaatcgaacgatcctctcttattggtcgaaggctcgtccagctccgagcgtgcgtaaggtgagggctccttccgctccgcgactgcgttaactggagccaggctgagcgtcggcgccggggttcggtggcctctagtgagatctggaggtgaggcgggcggtgaccgagaagaggggcaggggcggcggggagcggggcgagatgggtgggagcggggtttgggctgtgttggtggcaattctggagcttccctcggccctgggaagtggctaccggcagctcctgcggacctggagggggctgcggttgcgctttgtcggtgtggcagctcggacccgcggggactgcaaggaatgtccttgaggcccggcaggccgagcggcggccggcatcagtgccggagtaacccggggtcccggggtgggcttgagaggcgggcggcggtctggcctcttcgtgactgcggtcatcatcggtggacccgcggggcgtagctgcgttcatcgtccctgttcagtcagagtaggcagtgctggctgcacggtcacgaaaatcggggcggaaagggtgtcaggcagggtgacctcggaggcccctggattcgagaaatgctaggggtctatggggctgtcgggccggcagctcgcagggcagacgggagaagcgcctgcatcccgggatccggcattctcgccaggaactgctgttcgttagcacctttcttttaggtgacgggaaagatctctgtaaatactgctgactaacttagaaccatgaaagaaccgtggattggtgtagatgtgtctggttatttacaggagaacggcttgagaggatgcggagcccaacgtgggacttcgcacaatgactcaaaagattcttctccctctttttttttttttttttttggtaaggggtgtagtctccttggtgctgatattcttttaggaaaaatgtaccttggagatacaaatatagaacagttaatttctgcag

SEQ ID NO: 159 - DNA, 1757 bp, Human
tgaatagcccgacagttctgaactggaacatgggcattgggttctaaaggactaacataaaatctgtgaattaaaaaagctcaatgcattgtcttgtggaggatgaataaatgtgatcactgagacagccacttggtttttggctctttcagagaggtctcaggttctttccatgcagactcctcagatctgaacacagtttagtgctttacatgctgtgctctttgaagagatttcaacaagaatattgtatgttaaagcatcagagatggtaatctacagctcacctctgaaagcaaatataagctgggaaaaaagttttgatgaaattcttgaagttcatggtgatcagtgcaattgaccttctccctcactcctgccagttgaaaatggatttttaaattatactgtagctgatgaaactcctgattttgtagttaatttattaagtctgggatgtagaacttcaagaagtaagagctaagttctaagttcatgtttgtaaattaatacttcatttggtgctggtctattttgattttggggggtaatcagcattattcttcagaaggggacctgttttcttcaagggaagaaacactcttattcccaaactacagaataatgtgttaaacatgctaaatagttctatcaggaaaacaaatcactgtatttatctccgcaggctatttgttcagagaggccttttgtttaaatataaatgtttaaatataaatgtttgtctggattggctataacatgtctttcagcattaggcttttaagaaacacagggttttgtattctttactaaagatatcagagctcttaatgttgcttagatgagggtgactgtcaagtacaagcaagactgggaccttagaaatcattgtagaaacacagttttgaaagatttttaccatgtctctaagccaactttaattgcttaaaagacatttttatttagttgaaaaatctagttttttttgtaaactgtaccaaatctgtatatgttgtaataaaacttatgctagtttattggaagtgttcaagaaataaaaatcaacttgtgtactgataaaatactctagcctgggccagagaagataatgttctttaatgttgtcaggaaaccctggcttgcttgccgagcctaatgaaagggaaagtcagctttcagagccagtgaaggagccacgtgaatggccctagaactgtgcctagttcctgtggccaggaggttggtgactgaaacattcacacagggctcttggatggacccacgaacgctcttagctttctcagggggtcagcagagttattgaatcttaattttttttaatgtacaagttttgtataaataataaagaactccttattttgtattacatctaatgcttaagtgttgctcttggaaagctgatgatgtctcttgtagagatgactctgaaaaacattccaggaaaccatggcagcatggagagcctcttagtgattgtgtctgcattgttattgtggaagatttaccttttctgttgtacgtaaagcttaaattacttttgttgtgactttttagccagtgactttttctgagcttttcatggaagtggcagtgaaaaatatgttgagtgttcaaaaaagtgactgtaattaatatcttgctggattaatgttttgtacaattactaaattgtatacattttgttatagaatacttttttctagtttcagtaaataatgaaaaggaagttaatacca

SEQ ID NO: 160 - DNA, 1045 bp, Mus musculus
gagaaagcactgctgaagcttcaggagttctttcctgacatgcagattctggcagtcagtgggaactattgcaccgacaagaagcctgctgccataaattggatcgaaggacgaggaaagactgtggtttgtgaagccgtcattccagccaaggtggtgagagaggtgttaaagacaactacggaagctatggttgacgtaaacattaacaagaatcttgtgggctcggccatggctgggagcataggcggctacaacgcccacgcagcaaacattgtcactgctatctacatcgcatgtggccaggatgcagcacagaatgtggggagttcaaactgtattactttaatggaagccagtggtcccacaaatgaagacttatatatcagctgcaccatgccatcgatagagataggaaccgtgggtggtgggaccaaccttctacctcagcaagcctgcctgcagatgctaggtgttcaaggagcatgcaaagacaatcctggagaaaacgcacggcagcttgcccgaattgtatgtggcactgtgatggctggtgagctgtccttgatggcagccttggcagcaggacatcttgtcagaagtcacatggttcacaacagatcaaagataaatttacaagatcttcaaggaacgtgcaccaagaaggcagcttgaggatcctgacactgaactgaagcgcgggcattgggttctcaaggactaacatgcaatctgtgaattaaaaatctcaatgcactgtctagtggaagatgaatggacatgatcagtgacacccctgcttggtttctggcgctttcagagacgtctgaggttctttgcacagagactcctcagatgtggaaactctggttctttccgtgctgtgttctggaaagatctcacgtggatggtaccggtgctctgagcaccacagatgtgagctacagttcgtttctgaaagctaccacaagctggaaactggtgatgtgtggggctcacctctccgtgggttaaaaatggttttaaatgacactgtagctgacag

SEQ ID NO: 161 - DNA, 2664 bp, Mesocricetus auratus
atgttgtcaagacttttccgtatgcatggcctctttgtggcctcccacccctgggaagttattgtggggacggtgacacttaccatctgtatgatgtcaatgaacatgttcactggcaacaacaagatctgtggttggaattacgagtgcccaaaatttgaagaggacgtattgagcagtgacatcatcatcctcaccataacacggtgcatcgccatcctgtacatttacttccagttccagaacttacgtcagcttgggtcgaaatatattttaggtattgctggcctgttcacaattttctcaagttttgtctttagtacagtcgtcattcacttcttagacaaagaactgacaggcttaaatgaagctttgccctttttcctgcttttgattgacctttctagagcgagtgcactagcaaagtttgccctaagttcaaactctcaggatgaagtaagggaaaatatagctcgtggaatggcaattctgggccccacatttacccttgatgctcttgtggaatgtcttgtaattggagttggcaccatgtcaggggtgcgccagctggagatcatgtgctgctttggctgcatgtctgtgcttgccaactacttcgtgttcatgacgttcttcccagcgtgtgtgtccctggtcctagagctttctcgggaaagccgagagggtcgtccaatttggcagctcagccattttgccagagttttggaagaagaagaaaataaaccgaaccctgtaacccaaagggtcaagatgattatgtctttaggcttggttcttgttcatgctcacagtcgctggatagctgatccttcccctcagaacagcacaacagaacattctaaagtttccttgggactagatgaagatgtgtccaagagaattgaaccaagtgtttctctctggcagttttatctctccaagatgatcagcatggacattgaacaagtggttaccctgagcttagctttcctgttggctgtcaagtacattttctttgaacaagcagagacagaatctacgctgtctttaaaaaatcctatcacgtctcctgttgcgaccccaaagaaagctccagacaactgttgcagacgggagcctgtgctctcgagaaggaatgagaagctttcgtcagttgaggaggagcctggggtgaaccaagatagaaaagttgaggttataaaaccattagtggcagaaactgagagcacaagcagagctacattcgtgcttggcgcctctgggggctgctctccagtggcactggggacacaggagcctgaaattgaacttcccagtgagcctcgacctaatgaagaatgtctgcagatactggagagtgccgagaaaggtgcaaagttcctgagcgatgcagagatcatccagttggtcaatgccaagcacatcccggcctacaaattggaaactctaatggaaactcatgaacgtggtgtatctattcgccggcagctcctctccacaaagcttccagagccttcttctctacagtacctgccttatagagattataattattccctggtgatgggagcttgctgtgagaatgtgatcggatatatgcccatccctgtcggagtggcagggcctctgtgcctggatgggaaagagtaccaggttccaatggcaacaacggaaggctgtctggtggccagcaccaacagaggctgcagggcaataggtcttggtggaggtgccagcagccgggtccttgcagatgggatgacccgaggcccagtggtgcgtcttcctcgtgcttgtgattctgcagaagtgaaggcctggcttgaaacacccgaagggtttgcagtgataaaggacgccttcgatagcaccagcagattcgcacgtctacagaagcttcatgtgactatggcagggcgcaacctgtacatccgtttccagtccaagacgggggatgccatggggatgaacatgatttccaagggcactgagaaagcacttgtgaagcttcaggagttctttcctgaaatgcaaattctggcagttagcggtaactactgcactgacaagaaacctgctgccgtaaactggatcgaaggaagaggaaagacagttgtgtgtgaagctgtcattccagccagggtggtgagagaagtattaaagacgactacggaagctatgattgacgtaaacattaacaagaatctggtgggttctgccatggctgggagcataggaggctacaatgcccatgcagcaaacatcgtcactgccatctacattgcatgtggccaggatgcagcacagaatgtggggagttcaaactgtattactttaatggaagcaagtggtcccacgaatgaagacttgtatatcagctgcaccatgccatctatagagataggaaccgtgggtggtgggaccaacctcctaccgcagcaggcctgtctgcagatgctaggtgttcaaggagcgtgcaaagacaatcctggagaaaatgcacggcagcttgcccgaattgtgtgtggtactgtaatggctggggagttgtccttgatggcagcattggcagcaggacatcttgtcagaagtcacatggttcacaacagatcgaagataaatttacaagatctgcaaggaacatgcaccaagaaggcagcttga

SEQ ID NO: 162 - DNA, 3450 bp, Saccharomyces cerevisiae
ggaatattttgtacgagcaagttatagtaagacacttcagtgagaaattaatctgacttacttttacttaattgtgttctttccaaattatttattaacttatttttttcttctttctacccaattctagtcaggaaaagactaagggctggaacatagtgtatcattgtctaattgttgatacaaagtagataaatacataaaacaagcatgccgccgctattcaagggactgaaacagatggcaaagccaattgcctatgtttcaagattttcggcgaaacgaccaattcatataatacttttttctctaatcatatccgcattcgcttatctatccgtcattcagtattacttcaatggttggcaactagattcaaatagtgtttttgaaactgctccaaataaagactccaacactctatttcaagaatgttcccattactacagagattcctctctagatggttgggtatcaatcaccgcgcatgaagctagtgagttaccagccccacaccattactatctattaaacctgaacttcaatagtcctaatgaaactgactccattccagaactagctaacacggtttttgagaaagataatacaaaatatattctgcaagaagatctcagtgtttccaaagaaatttcttctactgatggaacgaaatggaggttaagaagtgacagaaaaagtcttttcgacgtaaagacgttagcatattctctctacgatgtattttcagaaaatgtaacccaagcagacccgtttgacgtccttattatggttactgcctacctaatgatgttctacaccatattcggcctcttcaatgacatgaggaagaccgggtcaaatttttggttgagcgcctctacagtggtcaattctgcatcatcacttttcttagcattgtatgtcacccaatgtattctaggcaaagaagtttccgcattaactctttttgaaggtttgcctttcattgtagttgttgttggtttcaagcacaaaatcaagattgcccagtatgccctggagaaatttgaaagagtcggtttatctaaaaggattactaccgatgaaatcgtttttgaatccgtgagcgaagagggtggtcgtttgattcaagaccatttgctttgtatttttgcctttatcggatgctctatgtatgctcaccaattgaagactttgacaaacttctgcatattatcagcatttatcctaatttttgaattgattttaactcctacattttattctgctatcttagcgcttagactggaaatgaatgttatccacagatctactattatcaagcaaacattagaagaagacggtgttgttccatctacagcaagaatcatttctaaagcagaaaagaaatccgtatcttctttcttaaatctcagtgtggttgtcattatcatgaaactctctgtcatactgttgtttgtcttcatcaacttttataactttggtgcaaattgggtcaatgatgccttcaattcattgtacttcgataaggaacgtgtttctctaccagattttattacctcgaatgcctctgaaaactttaaagagcaagctattgttagtgtcaccccattattatattacaaacccattaagtcctaccaacgcattgaggatatggttcttctattgcttcgtaatgtcagtgttgccattcgtgataggttcgtcagtaaattagttctttccgccttagtatgcagtgctgtcatcaatgtgtatttattgaatgctgctagaattcataccagttatactgcagaccaattggtgaaaactgaagtcaccaagaagtcttttactgctcctgtacaaaaggcttctacaccagttttaaccaataaaacagtcatttctggatcgaaagtcaaaagtttatcatctgcgcaatcgagctcatcaggaccttcatcatctagtgaggaagatgattcccgcgatattgaaagcttggataagaaaatacgtcctttagaagaattagaagcattattaagtagtggaaatacaaaacaattgaagaacaaagaggtcgctgccttggttattcacggtaagttacctttgtacgctttggagaaaaaattaggtgatactacgagagcggttgcggtacgtaggaaggctctttcaattttggcagaagctcctgtattagcatctgatcgtttaccatataaaaattatgactacgaccgcgtatttggcgcttgttgtgaaaatgttataggttacatgcctttgcccgttggtgttataggccccttggttatcgatggtacatcttatcatataccaatggcaactacagagggttgtttggtagcttctgccatgcgtggctgtaaggcaatcaatgctggcggtggtgcaacaactgttttaactaaggatggtatgacaagaggcccagtagtccgtttcccaactttgaaaagatctggtgcctgtaagatatggttagactcagaagagggacaaaacgcaattaaaaaagcttttaactctacatcaagatttgcacgtctgcaacatattcaaacttgtctagcaggagatttactcttcatgagatttagaacaactactggtgacgcaatgggtatgaatatgatttctaaaggtgtcgaatactcattaaagcaaatggtagaagagtatggctgggaagatatggaggttgtctccgtttctggtaactactgtaccgacaaaaaaccagctgccatcaactggatcgaaggtcgtggtaagagtgtcgtcgcagaagctactattcctggtgatgttgtcagaaaagtgttaaaaagtgatgtttccgcattggttgagttgaacattgctaagaatttggttggatctgcaatggctgggtctgttggtggatttaacgcacatgcagctaatttagtgacagctgttttcttggcattaggacaagatcctgcacaaaatgttgaaagttccaactgtataacattgatgaaagaagtggacggtgatttgagaatttccgtatccatgccatccatcgaagtaggtaccatcggtggtggtactgttctagaaccacaaggtgccatgttggacttattaggtgtaagaggcccgcatgctaccgctcctggtaccaacgcacgtcaattagcaagaatagttgcctgtgccgtcttggcaggtgaattatccttatgtgctgccctagcagccggccatttggttcaaagtcatatgacccacaacaggaaacctgctgaaccaacaaaacctaacaatttggacgccactgatataaatcgtttgaaagatgggtccgtcacctgcattaaatcctaaacttagtcatacgtcattggtattctcttgaaaaagaagcacaacagcaccatgtgttacgtaaaatatttactt

SEQ ID NO: 163 - DNA, 3716 bp, Arabidopsis thaliana
gaatcattcaaaaaaaaacagatctcctagtgatatgaatcaaagtttatcaataaaaatcttagtatacatttgcaaaccataacttcataattttgaataaacgataatgtaagacaggttggctcattagaaagcatatcaaattaattgtaaggacacaaatatctataattaatgcaggcttttatgaatcaatcatcatcattcacatcctcgtataattgtctaatttcgtacctcaaaaaaaaaacaacaacgtgaaaacctaaaattagatgagttacgaaaattaggcaaaaataaataaactaaatcatagtattacaaaacaaaatgaaaacgaaaaaatgaagaaaaagcaagctggtccccaacagacatgcgagttcgtctcctataaaactttgttaatctctccttcacacttatcacgccacctcaccacctctctcctctctcctctctctcccccctggagagattattcattccctccaatggatctccgtcggaggcctcctaaaccaccggttaccaacaacaacaactccaacggatctttccgttcttatcagcctcgcacttccgatgacgatcatcgtcgccgggctacaacaattgctcctccaccgaaagcatccgacgcgcttcctcttccgttatatctcacaaacgccgttttcttcacgctcttcttctccgtcgcgtattacctcctccaccggtggcgtgacaagatccgttacaatacgcctcttcacgtcgtcactatcacagaactcggcgccattattgctctcatcgcttcgtttatctatctcctagggttttttggtattgactttgttcagtcatttatctcacgtgcctctggtgatgcttgggatctcgccgatacgatcgatgatgatgaccaccgccttgtcacgtgctctccaccgactccgatcgtttccgttgctaaattacctaatccggaacctattgttaccgaatcgcttcctgaggaagacgaggagattgtgaaatcggttatcgacggagttattccatcgtactcgcttgaatctcgtctcggtgattgcaaaagagcggcgtcgattcgtcgtgaggcgttgcagagagtcaccgggagatcgattgaagggttaccgttggatggatttgattatgaatcgattttggggcaatgctgtgagatgcctgttggatacattcagattcctgttgggattgctggtccattgttgcttgatggttatgagtactctgttcctatggctacaaccgaaggttgtttggttgctagcactaacagaggctgcaaggctatgtttatctctggtggcgccaccagtaccgttcttaaggacggtatgacccgagcacctgttgttcggttcgcttcggcgagacgagcttcggagcttaagtttttcttggagaatccagagaactttgatactttggcagtagtcttcaacaggttcatctttttaaccaatattttcccgttggatttgattttgttgacttttgatttaagatatatttcccagtgaggagacttgttcaactaaatttgataggaagcttttacatcaagtttgtgttgaaaatttgcattgaaagtattttgtgaagtgttttgatttaagatggagaattttgcaaggggattttactgaagaagagtgaatttttggatgcaggtcgagtagatttgcaagactgcaaagtgttaaatgcacaatcgcggggaagaatgcttatgtaaggttctgttgtagtactggtgatgctatggggatgaatatggtttctaaaggtgtgcagaatgttcttgagtatcttaccgatgatttccctgacatggatgtgattggaatctctggttagtttccttctttgtgtgattgatctgatttaaaaacttccctatatcaagcttagtgtcatcttgagacttaaaactctagttgatatttttgatgctatcttgtgaaattctgagaaccgcacagttgctaatatattcttatcataattcttcaggtaacttctgttcggacaagaaacctgctgctgtgaactggattgagggacgtggtaaatcagttgtttgcgaggctgtaatcagaggagagatcgtgaacaaggtcttgaaaacgagcgtggctgctttagtcgagctcaacatgctcaagaacctagctggctctgctgttgcaggctctctaggtggattcaacgctcatgccagtaacatagtgtctgctgtattcatagctactggccaagatccagctcaaaacgtggagagttctcaatgcatcaccatgatggaagctattaatgacggcaaagatatccatatctcagtcactatgccatctatcgaggtagttgatcaaacctctttctctgagctcacttataaagtttctgaattcaagagatcttgattatggtttttgggtttggatttatcaggtggggacagtgggaggaggaacacagcttgcatctcaatcagcgtgtttaaacctgctcggagttaaaggagcaagcacagagtcgccgggaatgaacgcaaggaggctagcgacgatcgtagccggagcagttttagctggagagttatctttaatgtcagcaattgcagctggacagcttgtgagaagtcacatgaaatacaatagatccagccgagacatctctggagcaacgacaacgacaacaacaacaacatgatctgaatctgaatcatcatcctctcaaagaaggacaacaatccaaaacaagggcaggctttttacaacgcattcactcaaaactcgctggtggacagattttagccatgtgcgtatgcgtttgcccttttgttaaataaaaaaactatttgttttgtttgtttgacttgatatctttttttgggattgaggattgagagagatagagagattttacaaactttctctctttctctctttctctctttctcatggataattcgtgtctctttgatttgtctaaggtttgtctttgtttgttaggaagtggtctatatgaacgaaaaatttgtgtatggtgcagttgcgtttggggacatttttgagattttttctctgttttgtttcctctcttcgtttttattgtttgttacatataaaatatttctctgtatgttggaacatctctctctctttagttgttgttggtaaaagatacggatcttctttcctccagaagaatccatctatataatattaccatctatgtgttctactagacttggactatattttaatggaaaagagaaaaaacaatcttttgttcactaggtcaagtgatcaatagctttcgagacttatatgtttgcatgattgggattcaaattacagaattatatatattatatactggtcttcagtttgttagaaatctcacattgaaaatgaaattcaaaccaaaccaacacttatatatggagtacaagaaacgggctaactcatttactaatattttttttttctaacaacaaataaaaatctctttggacttgaatcctcgaaaacaattcacaataaacaaaaattttctatcgacttgtagactttgaatcggtttactccaacttcaattgctaaaatatcgacacatatgtagatgtccattgtccgatgatgtttataattttgacaaaactcgag

SEQ ID NO: 164 - DNA, 2966 bp, Stongylocentrotus purpuratus
ctcagtgaaaaatgagtaagatccaacatgttatcgcgcctattcttagcccaggggaggttctgttcctcgcacccctgggaagtgatcgtctgtaccctcaccctaaccatctgtatgctctccatgaactacttcaccggtctgccaaggatatgcggatggaactacgaatgtgcaccacaagttaaggaatcatcactttcttctgatgtgcttgtcatgtgtatcatgagaacattagctgtggcttacctatacctccagtttactaagctgagaaccacagggtctaaatacattctaggtattgcaggtctgtttaccatcttctccagttttctgttcagcagtgctgtgattcacctgtttggattggaactcacaggcttgaatgaggctctcccgttcttcctgctgctgatcgatctgacgaaggccagcgctctcaccaagtttgccctgagtagcaccactcagaatgaggtggtggacaacatcgcccgcggtatggccattcttggaccaaccatcacactggacactgtagtgaccaccttggtcatcagcatcggaaccatgtcaagcatccggaagatggaggttttctgctgcttcggcatcctctccctcatcgccaactattttgttttcatgaccttcttcccagcttgtctctctctcgttcttgagctgtcaaacagtaacaagtatggccgacccgtgtggcatcttggacgctttgccgaggtactggaggaggaagaggacaggaaacccaatcctgtggtccagcgggtcaagatgatcatgcggactggacttgtactggttcatgctcacagctactggcttgctagtaatgacacggaactgatgagtcgagatatgctctacgatggaaacctactcacagacaagaagattgatcctaccatgcctctatgggagttctacgcgacaagactatggcctcccaccctggactacatcctcactgctatcctagcaactgtcctagcaagccactacatcttcttctctgacttggccacctacccagagaagcgggtcagcatcatggaaggtcatgaggtcgtcaaccctggatccgatcacgaagatgcatctgaagttgagactattggcacactctcctcctctccctcaaccagtgatgtaagggtcattgaatcgatgacctctcgcacccaggcctgccagaccgacccggtgaccgcctcgccacgtaatagccgttcatcgtcccctgtatcatctcactctgttaaacctgccaggttcactattggttcatcaggaagtggttctgaagatgaggaggaggaggttatcaaggaggaagaagtggagtgggtcctagagacagaactcaaggctcccagacccatgccagaactactggagatcctcaatgttgggaaaggaccaaatgccctgaccgatgatgaggtccagctcttggtcggtgctaaacacattcctgcatacaagctggagaatatcctggataaccctgagaggggcgtggcggtcaggaggcagatcatctccaagcttcttccaattactgatgcactggagaaactaccctacgcaagctatgactattcatttgtatccggagcatgctgtgagaatgtgatcggttacatgcctgtaccagtgggcgtggctggacccctcctcctggacggacaagagtttcaggttccaatggcaaccacggaaggatgcttggtggcgagtacaaacagaggatgcagagctcttagatctgctggtggtattcacagtgtcctgatcggtgatggcatgacaagaggtccattggtcagattaccaagtgcacaggaggcaggagctatcaaacaatggttggaagtcccagaaaactttgcagcgatcaaggaaaggtttgagtcgacaagccgcttcgccaaactgaagagtatccagaccgctctggctggtcgctacatgttcctcaggtttaaagcattgactggggatgctatgggcatgaacatgatatccaagggtacagagcaagcactccatgctctgcagaccatgtttcccaacatagaaatcatgagcttgagtggaaactactgcacagacaagaaggtagcagcgattaactggatcgaaggaagaggaaagtcggtggtctgtgaagccactgtcccagcacacattgtccagcaggttttgaaaaccagtgcatcagctttagtggacctcaacatccacaaaaaccttgtaggctcagccatggctggcagtataggaggcttcaatgcacatgcagctaacatcgtcaccgccatctacattgcaacaggacaggatgcagcccagaacattgccagttctaactgcatgaccctgatggagaccagaggacccaagggtggagatctgtacctgagctgtaccatgccatccattgagctaggaacggtaggaggaggtaccgtcttaccccctcagtcagcatgccttcagatgatggatgtgaaagggtctaacatccatggttcgggactgaatgcctctcagctggctaggatcgtctgcgctacagtgatggccggtgaactctcactcatgtcagctcttgcagctggtcaccttgtcaaaagccacatgaaacataacagatctgccctgaacattgccagtcctcttccatccatcgatgaggttgctacacacaggagaagcaagtcggtagacttctcagcgctcaaagaatcatcagcagcagcgccagggacatgcacagccaatgcatcatgacaaccttgcagctaaaccccccccccccccaaagagaaatgttggtcaccattcttgtattatagcaatgcacagaaaagtggacgattgcacaataactgtgatgagcaagtagaggagtcatgcagttttcttttgag

SEQ ID NO: 165 - DNA, 429 bp, Stongylocentrotus purpuratus
accatgttccctaacatagaaatcatgagcttgagtggaaactactgcacagacaagaaggtagcagcgattaactggatcgaaggaagaggaaagtcagtcgtctgtgaagccactgtcccagcacacattgtccaacaggtaagatactgtgagactagtcaaagttattgattcaataagccagttcacagttgcagtctgagcatgagcagatgaaggtcattgcagagcaaattttgaaatacacggagacgaaatactggatacgtgctcatgaaagttatggtaatcattattcattcaggcacaagcagggcactccatgatacacaggtggaagtattctttgaaaattgggaaacaaaggtaatttatatagcacctccatcgctgtaggagtgattatttaacaaggtacaaagtggg

SEQ ID NO: 166 - DNA, 3446 bp, Schistosoma mansoni
cggttttactcttgtgatttgttgcatgatctctcctgctcctaagttaacgctaacatataaaatcttacgacgcatcaggcaatatagtaacgcggagtacttcttcagatgttctttatgatgaggcttaggaattaaaatatccccaagaaccacatccttacatcactattagccagagaagaaatgctaccatcacagtatttcgctacagatgcttttcatctcagtcctttcgtttcatattctcaatgttcattcttctgtatcatcattttagtatcaactggatttgaactgttcgcaattattcccatttacttacaggaaaaattgagtattcgtagattaggcaacgttttgctgcttgacaatttacctgtaggctttatattctgaggtataaatatgctcaaaatactaaatactgtactgttatttttcgattgtttttcaactggaacctttttcgtgctcttgatttacctctttaccagacttcgtacacatttgcttcatttttcgtcatcgaattgtcatttagatgtgataatttatcaaagccgtgccgttatcatttttcttgtagtatttgtatacttcattggtgttttgacatgtaaaataaacgataaaattttggtccatacaatgctgaggaataaaaggcagttaaatactctgttttatacacttatccttttcactttcgccctatgctcattatcctcagttttatttgtaccgtataccagttttgctatatttctactctccacctcggtcttcttgttattttcagacttgtctgtattttttattgtactggagtactatttgttggaaattgaattggtgaattatgaacatgctaaacgccattgtttactcagtcatttattttcaaaccaattatttgtggatcatatgcttggtatgtttctaaaaacttcattgttcagcatcagtactacatcaaaatatgcatacttggaaagtatctttaaatgtactttgatggagcaaattatttacattatgattgtatttgttttcctaccatcatttatgaggatatttgcgtcgtatgcgaaaagaatgtacggtgaacaaaaaaagtgcttagtgtcgaataagggggtatccagctcgacacgaaagcgtagacactcatactcatccggccactcttacgtggagtatcgacgtatgagtgtccataaccttattggttatgttgtcaatccgaattgtcattataagtgttggtctaccacttttgtgatatttgtcagcttgataatacttcatttaaataatcgttattctgagcgaattagttctttcaagcacaattcaagtgagaatgaagtttttcctgtcttatatcatattactgcttatgaagttacgagtatcttccattttatttacaatatattccacgttatcaatgccaatttagtggtctacttgttcctcggattgttcttatttaagcgtatcagattgaataaacctattaactcacaattacgtaacttgaatatccccaaaataaaagagaccttgattagtgaccaagtaaaacagtctccagtattaccaaaattttcaaaaaaattgaatgatattcctcttcagtcacgaaaacggatatactgtttacataaagacgacgactatatcgatagaaacgattcctcgtctgtttctacattttctaatacgtgtaaaaatagcaatgaacgcccatccaatgttttggacttggatatgttgactgaaaagattaagcagggcttggggcatgaactatcagatacagagattttacaactattatcacatggaaggcttaaaactcgtgaattagaatcagtcgttcgcaatccatttcgggctgttgaactccgtcgtttagatttgtcaacatttcttaataacccacatattattgaacgcattccgtacaaagactatgattatcgtcttgtatatggtcaatgttgtgaagaggttatcgggtacatgcctataccagttggaaaaattggacctcttctactagatggtcgttctcattatattcctttggctactactgaaggatgcttggtagccagcacaaatcggggttgtcgtgcaattttcttggctggtggtatcaaaagtgttgtctatagagatcaaatgacaagagcacctgttgtttggttcccatcaattattgattcagtgaaatgtattgcatggattgattcagaggaagggttccaaactttaaaatcagctttcgataaaactagcgcacatgtaaacttattatcagtttttgcttgtccagctggtcgatatattcacattcgatttgctgcacgtacaggtgatgctatgggtatgaatatggttagcaaagccactgacagtgctttgcattgtctaaaaaaatatttcagtaatatgcaggttatctctttaagtggaaatatgtgtacagataaaaagccagctactataaacacaattcttggtcgtggtaaatctgttattgctgaagctcatttatcagctgatgtactggctcaagtgttacataccaatgcacaacgattagctcggttaactcattccaaaaattggattggatctgcaatggccggttgtcctggtatgatgggatgtaatgcacatgcagcgaatattattgctggaatgtttgcagctacggggcaagatttagctcaagttgttgactcatcatcttgcttaacacaattggaggttgatttatcagatgactcactggtagctagtgttactatgccatgtttagaagttggaacagtcggtggtggtacacgtctttcaggccaacgtgcatgtcttgacttactggatttaagcgtcgatcgtccaactgaacatttatcacggataattgctggaactgtactagcagctgaactgagcttaatggcagccttagacacagatgatttggtgaaagcacatatgcacttcaatcgagccaagcaatctacaaactctcactcctgtagtcattctactactactgataataatgataacattagtaatatttacgataatcataatgttgctttatcttcaaaaattcctgttactgataattcagatatacgcgaatctgttcattccctacatgtgaaaccatttcctgttaaaagtgacttatctgtaaatccggagatatcccattatactatgtagcttgtatatgtagacaattttactgtcagtttttaaaacacccttgtatatcattactaagccctagatttgaaggttaacaaataagttgtatgctcgaatcatttttagatgtttacttcattatcccatgtttttttccaatttctgtttccgtacgttcgatagaaataaacaaagtatacttc

SEQ ID NO: 167 - DNA, 1287 bp, PSEUDOMONAS mevalonii
atgagcctcgattcccgcctgcccgctttccgtaacctgtcccctgccgcgcgcctggaccacatcggccagttgctcggcctgagccacgacgatgtcagcctgctggccaacgccggtgccctgccgatggacatcgccaacggcatgatcgaaaacgtcatcggcaccttcgagctgccctatgccgtggccagcaacttccagatcaatggccgtgatgtgctggtgccgctggtggtggaagagccctcgatcgtcgccgctgcttcgtacatggccaagctggcccgtgccaacggcggcttcaccacctccagcagcgccccgctgatgcatgcccaggtacagatcgtcggcatacaggacccgctcaatgcacgcctgagcctgctgcgccgcaaagacgaaatcattgaactggccaaccgcaaggaccagttgctcaacagcctcggcggcggctgccgcgacatcgaagtgcacaccttcgccgataccccgcgtggcccgatgctggtggcgcacctgatcgtcgatgtacgcgatgccatgggcgccaacaccgtcaataccatggccgaggccgttgcgccgctgatggaagccatcaccgggggccaggtacgcctgcgcattctgtccaacctggccgacctgcgcctggccagggcccaggtgcggattactccgcagcaactggaaacggccgaattcagtggcgaggcagtgatcgaaggcatcctcgacgcctacgccttcgctgcggtcgacccttaccgcgcggccacccacaacaagggcatcatgaatggcatcgacccactgatcgtcgccactggcaacgactggcgtgcagtggaagccggcgcccatgcgtatgcctgccgcagtggtcactacggctcgctgaccacctgggaaaaggacaacaacggccatttggtcggcaccctggaaatgccgatgcccgtaggcctggtcggcggcgccaccaaaacccatccgctggcgcaactgtcgctgcgcatcctcggcgtgaaaacagcccaggcgctcgctgagattgccgtggccgtaggcctggcgcaaaacctcggggccatgcgcgccctggccaccgaaggcatccagcgcggccacatggccctgcatgcgcgcaatattgccgtggtggcgggcgcccgaggcgatgaggtggactgggttgcccggcagttggtggaataccacgacgtgcgcgccgaccgcgccgtagcactgctgaaacaaaagcgcggccaatga

SEQ ID NO: 168 - protein, 1054 aa, Saccharomyces cerevisiae
MPPLFKGLKQMAKPIAYVSRFSAKRPIHIILFSLIISAFAYLSVIQYYFNGWQLDSNSVFETAPNKDSNTLFQECSHYYRDSSLDGWVSITAHEASELPAPHHYYLLNLNFNSPNETDSIPELANTVFEKDNTKYILQEDLSVSKEISSTDGTKWRLRSDRKSLFDVKTLAYSLYDVFSENVTQADPFDVLIMVTAYLMMFYTIFGLFNDMRKTGSNFWLSASTVVNSASSLFLALYVTQCILGKEVSALTLFEGLPFIVVVVGFKHKIKIAQYALEKFERVGLSKRITTDEIVFESVSEEGGRLIQDHLLCIFAFIGCSMYAHQLKTLTNFCILSAFILIFELILTPTFYSAILALRLEMNVIHRSTIIKQTLEEDGVVPSTARIISKAEKKSVSSFLNLSVVVIIMKLSVILLFVFINFYNFGANWVNDAFNSLYFDKERVSLPDFITSNASENFKEQAIVSVTPLLYYKPIKSYQRIEDMVLLLLRNVSVAIRDRFVSKLVLSALVCSAVINVYLLNAARIHTSYTADQLVKTEVTKKSFTAPVQKASTPVLTNKTVISGSKVKSLSSAQSSSSGPSSSSEEDDSRDIESLDKKIRPLEELEALLSSGNTKQLKNKEVAALVIHGKLPLYALEKKLGDTTRAVAVRRKALSILAEAPVLASDRLPYKNYDYDRVFGACCENVIGYMPLPVGVIGPLVIDGTSYHIPMATTEGCLVASAMRGCKAINAGGGATTVLTKDGMTRGPVVRFPTLKRSGACKIWLDSEEGQNAIKKAFNSTSRFARLQHIQTCLAGDLLFMRFRTTTGDAMGMNMISKGVEYSLKQMVEEYGWEDMEVVSVSGNYCTDKKPAAINWIEGRGKSVVAEATIPGDVVRKVLKSDVSALVELNIAKNLVGSAMAGSVGGFNAHAANLVTAVFLALGQDPAQNVESSNCITLMKEVDGDLRISVSMPSIEVGTIGGGTVLEPQGAMLDLLGVRGPHATAPGTNARQLARIVACAVLAGELSLCAALAAGHLVQSHMTHNRKPAEPTKPNNLDATDINRLKDGSVTCIKS

SEQ ID NO: 169 - protein, 888 aa, Human [sequence omitted]

SEQ ID NO: 170 - protein, 887 aa, Mesocricetus auratus
MLSRLFRMHGLFVASHPWEVIVGTVTLTICMMSMNMFTGNNKICGWNYECPKFEEDVLSSDIIILTITRCIAILYIYFQFQNLRQLGSKYILGIAGLFTIFSSFVFSTVVIHFLDKELTGLNEALPFFLLLIDLSRASALAKFALSSNSQDEVRENIARGMAILGPTFTLDALVECLVIGVGTMSGVRQLEIMCCFGCMSVLANYFVFMTFFPACVSLVLELSRESREGRPIWQLSHFARVLEEEENKPNPVTQRVKMIMSLGLVLVHAHSRWIADPSPQNSTTEHSKVSLGLDEDVSKRIEPSVSLWQFYLSKMISMDIEQVVTLSLAFLLAVKYIFFEQAETESTLSLKNPITSPVVTPKKAPDNCCRREPLLVRRSEKLSSVEEEPGVSQDRKVEVIKPLVVETESASRATFVLGASGTSPPVAARTQELEIELPSEPRPNEECLQILESAEKGAKFLSDAEIIQLVNAKHIPAYKLETLMETHERGVSIRRQLLSTKLPEPSSLQYLPYRDYNYSLVMGACCENVIGYMPIPVGVAGPLCLDGKEYQVPMATTEGCLVASTNRGCRAIGLGGGASSRVLADGMTRGPVVRLPRACDSAEVKAWLETPEGFAVIKDAFDSTSRFARLQKLHVTMAGRNLYIRFQSKTGDAMGMNMISKGTEKALLKLQEFFPEMQILAVSGNYCTDKKPAAINWIEGRGKTVVCEAVIPAKVVREVLKTTTEAMIDVNINKNLVGSAMAGSIGGYNAHAANIVTAIYIACGQDAAQNVGSSNCITLMEASGPTNEDLYISCTMPSIEIGTVGGGTNLLPQQACLQMLGVQGACKDNPGENARQLARIVCGTVMAGELSLMAALAAGHLVRSHMVHNRSKINLQDLQGTCTKKSA

SEQ ID NO: 171 - protein, 424 aa, Streptococcus pneumoniae
MKISWNGFSKKSYQERLELLKAQALLSPERQASLEKDEQMSVTVADQLSENVVGTFSLPYSLVPEVLVNGQGYTVPYVTEEPSVVAAASYASKIIKRAGGFTAQVHQRQMIGQVALYQVANPKLAQEKIASKKAELLELANQAYPSIVKRGGGARDLHVEQIKGEPDFLVVYIHVDTQEAMGANMLNTMLEALKPVLEELSQGQSLMGILSNYATDSLVTASCRIAFRYLSRQKDQGREIAEKIALASQFAQADPYRAATHNKGIFNGIDAILIATGNDWRAIEAGAHAFASRDGRYQGLSCWTLDLEREELVGEMTLPMPVATKGGSIGLNPRVALSHDLLGNPSARELAQIIVSIGLAQNFAALKALVSTGIQQGHMKLQAKSLALLAGASESEVAPLVERLISDKTFNLETAQRYLENLRS

SEQ ID NO: 172 - protein, 425 aa, Streptococcus pyogenes
MTKTNLNWSGFSKKTFEERLQLIEKFKLLNAENLNQLKTDVLLPIQTANQMTENVLGRLALPFSIAPDFLVNGSTYQMPFVTEEPSVVAAASFAAKLIKRSGGFKAQTLNRQMIGQIVLYDIDQIDNAKAAILHKTKKLIALANKAYPSIVKRGGGARTIHLEEKGEFLIFYLTVDTQEAMGANMVNTMMEALVPDLTRLSKGHCLMAILSNYATESLVTTSCEIPVRLLDRDKTKSLQLAQKIELASRLAQVDPYRATTHNKGIFNGIDAVVIATGNDWRAIEAGAHAYASRNGSYQGLSQWHFDQDKQVLLGQMTLPMPIASKGGSIGLNPTVSIAHDLLNQPDAKTLAQLIASVGLAQNFAALKALTSSGIQAGHMKLHAKSLALLAGATQDEIAPLVNALLADKPINLEKAHFYLSQLRQS

SEQ ID NO: 173 - protein, 425 aa, Staphylococcus epidermidis
MKSLDKGFRHLTRKDKLKKLVEYGWLDDENYEILLNHPLINEEVANSLIENVIGQGALPVGLLPRIIVDDKEYVVPMMVEEPSVVAAASYGAKLVNQSGGFKTISSERLMIGQIVFDDVEDTGTLANSIYQIESQIHQIADEAYPSIKARGGGYQRIEIDTFPNHRLLSLKVFVDTKDAMGANMLITILEAITAHLKVKIFNQNVLMSILSNHATASVVQVQGEIDIEDLHRGERSGEEVAQRMERASVLAQVDIHRAATHNKGVMNGIHAVVLATGNDTRGVEASAHAYASKDGHYRGIATWEYDRSRNKLVGTIEVPMTLATVGGGTKVLPIAKASLNLLNVENAQELGQVVAAVGLAQNFSACRALVSEGIQQGHMSLQYKSLAIVVGAKGEEIAQVAEALKYESQANTAKAQEILMNIRKS

SEQ ID NO: 174 - protein, 425 aa, Staphylococcus haemolyticus
MKSLDKTFRHLSREDKLKQLVDYGWLTDESYDVLLKNPLINEEVANSLIENVIGQGTLPVGLLPKIIVDDKEYVVPMMVEEPSVVAAASYGAKLVNNTGGFKTVKSERLMIGQIVFDDVSDTDALAQAIYDLEPQIKQIAAEAYPSIIERGGGYRRIEIDTFPENQLLSLKVFVDTKDAMGANMLNTILEAITAHMKNEFPNRDVLMSILSNHATASVVRVQGEIDIKDLNKGDRSGEEVAQRMERASVLAQVDIHRAATHNKGVMNGIHAVVLATGNDTRGAEASAHAYASRDGQYRGIATWKFDKERGRLVGTIEVPMTLAIVGGGTKVLPIAKASLELLNVQSAQELGQVVAAVGLAQNFSACRALVSEGIQKGHMSLQYKSLAIVVGAQGDEIARVAEALKAAPKANTATAQQILKDLRQQ

SEQ ID NO: 175 - protein, 425 aa, Staphylococcus aureus
MQSLDKNFRHLSRQQKLQQLVDKQWLSEDQFDILLNHPLIDEEVANSLIENVIAQGALPVGLLPNIIVDDKAYVVPMMVEEPSVVAAASYGAKLVNQTGGFKTVSSERIMIGQIVFDGVDDTEKLSADIKALEKQIHKIADEAYPSIKARGGGYQRIAIDTFPEQQLLSLKVFVDTKDAMGANMLNTILEAITAFLKNESPQSDILMSILSNHATASVVKVQGEIDVKDLARGERTGEEVAKRMERASVLAQVDIHRAATHNKGVMNGIHAVVLATGNDTRGAEASAHAYASRDGQYRGIATWRYDQKRQRLIGTIEVPMTLAIVGGGTKVLPIAKASLELLNVDSAQELGHVVAAVGLAQNFAACRALVSEGIQQGHMSLQYKSLAIVVGAKGDEIAQVAEALKQEPRANTQVAERILQEIRQQ

SEQ ID NO: 176 - protein, 866 aa, Ips paraconfusus
MVSRLFLAHGEFCTNHPWEVIVATLTLTACMLTVERQNPIPPTKPITTSCQGCIQEAEYNAADLISMTILRSLAVLYCYYQFRKLHKLGSRYILGIAELFTVFSSFIFTTTVLNLLRVEVSDLKDALFFFLLLIDLSKAGMLAQFALTSQNEIEGKNNIAKGLAELGPTITLDTVVETLVIGVGTLSGVERLEMLSWFACLSVLVNYVVFMAFYPACLSLILELSRSTNFYKTKDPWMIFAFKEEEHKSNPVVQRVKLIMSVGLMIVHVHSRWPFKDSEVYNIEPLVQQSFNNTEESNSLHGYFERWLALGADHIVILILITALLIKLLFFEIQDLTEIRDQETQVEPEKSEKAENTEKEELKVVQEVRENKRMPMFSLSEDDSCETTFQDKEVQTQTPYNSEAHSSSEDDIPKVCKTLEDCLKIYNNVDMGATALTDEEIILLIKNRHIAGYQIEKAVDNPERGVGIRRKILGRDLDAPKVLEGLPYRNYDYSLVMGACCENVIGYMPIPVGYAGPLVLDGKEIYVPMATTEGCLVASTNRGCRALKEAGVTSRIVADGMTRGPVVRFPSIIRASQAMQWIQDNFDGIKEQFDSSSRFARLQRVTMKIAGRLLFIRFVATTGDAMGMNMLSKGTEYSLKFVQRAFEDMEILSLSGNFCTDKKPAAVNWIEGRGKSVVCEAIVPAKIVANILKTNVHALVDVNNSKNMVGSAVAGSIGGFNAHAANIVTAIFLATGQDPAQNVGSSNCMTLMEPWGPTGEDLYISCTMPSIEIGTIGGGTILPPQGTCLEMLGVRGSNIAEPGANASQLAKIVGATVLAGELSLMSALAAGHLVRSHLRHNRSTTLLPDAFDKNKNILVPPCKDKV

SEQ ID NO: 177 - protein, 353 aa, Kitasatospora griseola
MTEAHATAGVPMRWVGPVRISGNVATIETQVPLATYESPLWPSVGRGAKVSRLTEKGIVATLVDERMTRSVLVEATDALTALSAARTIEARIDELRELVRGCSRFAQLIGIRHEITGNLLFVRFEFSTGDASGHNMATLASDVLLQHLLETVPGISYGSISGNYCTDKKATAINGILGRGKNVVTELLVPRDVVADVLNTTAAKIAELNLRKNLLGTLLAGGIRSANAHYANMLLAFYLATGQDAANIVEGSQGVVTAEDRDGDLYLACTLPNLIVGTVGNGKGLGFVETNLNRLGCRADREPGENARRLAVIAAATVLCGELSLLAAQTNPGELMRAHVQLERGHTTAKAGV

SEQ ID NO: 178 - protein, 434 aa, Leishmania major
MRRSLLLACSAAKGESWASMSDTEIMKQVENKKIAFHGLEQALAPDYDRAIAIRREIVKKKICPSPAATHPLERVPYKNYDWSSVVGQSCENILGYVPVPVGLAGPLLLDGKEVALPMATTEGALVASAHRGARAINLSGGCRTAVLKEGMTRAPVVEVNSFDEAITVIKFCEERFDVLREAFESTTRFGKLLSIKCAMAGRQVHLRFSAFTGDAMGMNMITKGCDKALQVLQQHIPSVRVLTLSGNFCTDKKPSALNWVEGRGKSVVAEAVIKRDVVESVLKCTVDSVVSLNVTKNLRGSALAGSIGGFNAHAANIVAALYIATGQDPAQVVESATCMTTVDKAGEDLVISLMMPSIEVGAVGGGTGLSSQRAMLELMGCAGSNKEDPGAHSRQIARVVAGAVICGELSLLSGLAAGHLLSAHMKLNRKPPTP

SEQ ID NO: 179 - protein, 106 aa, Gibberella fujikuroi
PMATTEGVLVASASRGCKAINSGGGAITVLTADGMTRGPCVAFETLERAGAAKLWLDSEAGQDMMKKAFNSTSSFARLQSMKTALAGTNLYIRFKTTTGDAMGMNM

SEQ ID NO: 180 - protein, 247 aa, Anthonomus grandis
  MISC_FEATURE (1)..(247): x equals unknown
EAMGMNMISKGTEKSLAYIKSHFEDMEILSLSGNVCTDKKPSAINWIEGRGKSVVCEAIVPANIVHSILKTTTHALVDLNISKNMVGSAVSAAIGGFNAHAANIVTAIYIATGQDVAQNVGSSNCITLMEPCGDKGEDLLISCTMPSVEIGTVGGGTVLPAQGACLEMLGVKGAHSENPGDNAKQLAKIVCGAVLAGELSLMAALVTGHLVKSHLRLNRSYSEKDSPFKKSVGGSSXMSNITQFQYG

SEQ ID NO: 181 - protein, 846 aa, Dendroctonus jeffreyi
MASRLFRVHGEFCTNHPWEVIVATLTLTACMLTVEQQPPLRPIKPTIKSCLGCIQEAEHNAADLISMTILRSLAVLYCYYQFRKMHKLGSKYVLGIAGLFTVFSSLVFTTTVLNILRIKVSDLKDALFFFLLLIDLSKAAILAQFALNGANQAERKTNIAKGLAELGPTITLDTLVETLVIGVGTMSGVARLEMLSWFACLSVLVNYIVFMTFYPACLSLILELSQSSNFCKTKDSWKIFAFKEDRKSNPVLQRVKLIMSVGLMVVHVQSRWPFRDSEVYTIEPLVQQSFNKTDDSIATHVSFIRWLVLGADHIVIIILVSALLIKLIFFEIKDNLVEIKPGFDKETPKPTKQMPMINFTLGESCESTYEDKEVQTLATSNSDVDSSSDDGVPKQCRSLEDCVKIFKNIDLGATALTDDEIILLIKNKNIAAYQIEKEVDDPERGVGIRRKILGRDLLESPKLLENLPFRNYDYSLVMGACCENVIGYMPIPVGYAGPLLLDGRELYIPMATTEGCLVASTNRGCRALKVSGVTSSVVADGMTRGPVVRFPSIVRTSQAMQWIQDPDNFKKIKEQFDSSSRFARLQRLTLKIAGRFLFIRFIATTGDAMGMNMLSKGTEYSLKLVQQVFYDMEILSLSGNFCTDKKPAAINWIEGRGKSVVCEAIVPAKIISSILKTNVHALVDVNNIQEHVGSAVAGSIGGFNAHAANIVTAIFLATGQDPAQNVSSSNCMTLMEPWGPDGEDLYISCTMPSIEIGTIGGGTILPAQSACLDILGVKGSNRENPGANACQLAKIVCGTVLAGELSLMSALTAGHLVKSHLRHNRSTTLLPDAFDRKKISFTQLPR

SEQ ID NO: 182 - protein, 353 aa, Streptomyces sp
MTDTHAIAMVPMKWVGPLRISGNVATTETHVPLATYETPLWPSVGRGAKVSMLSERGIAATLVDERMTRSVLVEATDAQTAYTAARAIEARIEELRAVVRTCSRFAELLQVRHEIAGNLLFVRFEFSTRRPSGHNMATLASDALLAHLLQTIPGISYGSISGNYCTDKKATAINGILGRGKNVVTELVVEREVVERVLHTTAAKIVELNIRKNLLGTLLAGGIRSANAHYANMLLGFYLATGQDAANIVEGSQGVTLAEDRDGDLYFSCNLPNLIVGTVGNGKGLEFVETNLNRLGCREDRAPGENARRLAVIAAATVLCGELSLLAAQTNPGELMRAHVELERDNTTAEVGV

SEQ ID NO: 183 - protein, 353 aa, Kitasatospora griseola; identical to SEQ ID NO: 177

SEQ ID NO: 184 - protein, 567 aa, Artemisia annua
MDLRRKLPPKPPSSTTTKQPSHRSHSPTPIPKASDALPLPLYLTNTFFFTLFFSVAYYLLHRWRDKIRSGTPLHVVTLTELSAIVLLIASFIYLLGFFGIDFVQSFTSRENEQLNNDDHNVVSTNNVLSDRRLVYDYGFDVTGDNDNDNDDDVIVKSVVSGEVNSYSLEASLGDCYRAAKIRKRAVERIVGREVLGLGFEGFDYESILGQCCEMPIGYVQVPVGVAGPLLLNGGEFMVPMATTEGCLVASTNRGCKAICLSGGATAILLKDGMTRAPVVRFATAERASQLKFYLEDGVNFDTLSVVFNKSSRFARLQNIQCSIAGKNLYIRFTCSTGDAMGMNMVSKGVQNVLDFLQNDFPDMDVIGISWKFCSDKKPTAVNWIEGRGKSVVFQAVITKKVVRKSALNPQTCTCRTLTCLRPLLVLLLLVLLVDLMHMLHIVSAVFIATGQDPAQNIESSHCITMMEAVNNGKDLHVNVTMPSIEVGTVGGGTQLASQSACLNLLGVKGACIESPGSNAQLLARIVAGSVLAGELSLMSAISAGQLVKSHMKYNRSSRDMSAIASKV

SEQ ID NO: 185 - protein, 560 aa, Oryza sativa
MEVRRRAPLPPPPGRVQAGDALPLPIRHTNLIFSALFAASLAYLMRRWREKIRSSTPLHVVGLAEMLAIFGLVASLIYLLSFFGIAFVQSIVSSSDDEEEDFLVGPARGSSAAAAVAPRAPSSPAQCSLLGSPHDDAARERMPEEDEEIVSSVVAGKVPSYVLETKLGDCRRAAGIRREAVRRITGRQIEGLPLDGFDYASILGQCCELPVGYVQLPVGIAGPLLLDGQRFYVPMATTEGCLVASTNRGCKAIAESGGAVSVVLRDGMTRAPVARLPTARRAAELKAFLEDSVNFNTLSMVFNRSSRFARLQGVQCAMAGRNLYMRFSCCTGDAMGMNMVSKGEQNVLDYLQDDFPDMDVISISGNFCSDKKPAAVNWIEGRGKSVVCEAVIKEDVVKKVLKTNVQSLVELNVIKNLAGSAVAGALGGFNAHASNIVTAIFIATGQDPAQNVESSHCITMLEAVNDGRDLHISVTMPSIEVGTVGGGTQLASQAACLDLLGVKGANRESPGSNARLLATVVAGGVLAGELSLLSALRAGQLVKSHMKYNRSSKDMSKVIS

SEQ ID NO: 186 - protein, 587 aa, Cucumis melo
MDRRRSLRPPRPNAVQDADATCTFRRDEQDASAADHLKRASPKASDALPLPLYLTNTIFFTLFFSVAYYLLHRWRDKIRNSTPLHVVTLSEIAAIVSLMASFIYLLGFFGIDFVQSFIARSSPDAWDLEDEIDRTLLIDNNRYAAPRSASAVALPSKVVDAEALNTIPLPEEDEEVVKMVVDGSVPSYSLESKLGDPKRAASIRREALQRTTGRSIHGLPFEGFDYESILGQCCEMPVGYVQIPVGIAGPLLLDGFEYTVPMATTEGCLVASTNRGCKAIYASGGATSMLLKDGMTRAPVVRFGSAKRASELKFFLEDPSNFDTLAVVFNRSSRFARLQSIRCSIAGKNLYVRFCCSTGDAMGMNMVSKGVQNVLEFLQHDFSDMEVIGISGNFCADKKPAAVNWIEGRGKSVVCEAVIKDEVVRKVLKTSVASLVELNMLKNLTGSAMAGALGGFNAHSSNIVSAIFLATGQDPAQNVESSHCITMMEPVNNGRDLHISVTMPSIEVGTVGGGTQLASQSACLNLLGVKGASKESPGANSRLLATIVAGSVLAGELSLMSAIAAGQLVRSHMKYNRSSRDVSKLES

SEQ ID NO: 187 - protein, 121 aa, Glycine max
EGRGKSVVCEAIIKEEVVQKVLKTNVSALVELNMLKNLAGSAVAGALGGFNAHASNIVSAIFIATGQDPAQNVESSHCITMMEAINDGRDLHISVTMPSIEVGTVGGGTQLASQSACLNLL

SEQ ID NO: 188 - protein, 236 aa, Schistosoma mansoni
MLKILNTVLLFFDCFSTGTFFVLLIYLFTRLRTHLLHFSSSNCHLDVIIYQSRAVIIFLVVFVYFIGVLTCKINDKILVHTMLRNKRQLNTLFYTLILFTFALCSLSSVLFVPYTSFAIFLLSTSVFLLFSDLSVFFIVLEYYLLEIELVNYEHAKRHCLLSHLFSNQLFVDHMLGMFLKTSLFSISTTSKYAYLESIFKCTLMEQIIYIMIVFVFLPSFMRIFASYAKRMYGEQK

SEQ ID NO: 189 - protein, 18 aa, Solanum tuberosum
MDVRRRPVKPLYPSEHIS

SEQ ID NO: 190 - protein, 59 aa, Solanum tuberosum
MDVRRRPVKPLYTSKDASAGEPLKQEVSSPKASYALPLPLYLTTGLFFTMFSLLCIFFS

SEQ ID NO: 191 - protein, 82 aa, Solanum tuberosum
MDVCRRPVKPLYTSKDAFAGEPLKQEVSSPKASDALPLPLYLTTGLFFTMFFSVMYFLLVRWREKIRNSIPLHVVTLSELLA

SEQ ID NO: 192 - protein, 82 aa, Solanum tuberosum
MDVRRRPVKPLYTSKDASAGEPLKQEVSSPKASDALPLPLYLTTGLFFTMFFSVMYFLLVRWREKIRNSIPLHVVTLSELLA

SEQ ID NO: 193 - protein, 82 aa, Solanum tuberosum
MDVRRRPVKPLYTSKDASAGEPLKQEVSSPKASDALPLPLYLTTRLFFTMFFSVMYFLLVRWREKIRNSIPFHVVTLSELLA

SEQ ID NO: 194 - protein, 82 aa, Solanum tuberosum; identical to SEQ ID NO: 192

SEQ ID NO: 195 - protein, 82 aa, Solanum tuberosum
MDVRRRPVKPLYTSKDASAGEPLKQEVSSPKASDALPLPLYLTTGLFFTMFFSVMYFLLIRWREKIRNSIPLHAVTLSELLA

SEQ ID NO: 196 - protein, 934 aa, Pichia jadinii
MFYHGASANQHWIAVDDLSKVPVDVDHYNVVPFQFRRAGEYKEPVLSGIVELDEVKFVVSQSDAAEQWQQLTAEDGTVWRSRAYHGKLGKYSDMAVGAFNKVLNLVRGAETFDIALVTCAYIAMFYTLFNLFARMRAVGSKVWLGLSTLVSSFFAFLFALYITTRVLDLSIPFLSLSEGIPFFVAVVGFNNKILLAEKVLQNQLNAQSSKNDAPTVLYQALREQGPLLLRDHLFMITAFLGCSFYASYLDGLKNFCILAALILAFDILTTSTFLSAILSLKLEINQIHRSTLLREQLEDDGLTETTVDDVLKSNSLAGTKTFTDAPSTLVTVAKVAGVSVFFGLHFYGFGSAWLSDLSAGNETNDTFTLYDAVADQIPIGSNGTLVTLFPTRFFLPEKLSTQIEAVVLSFIGLISTAARDKYISKFILFAFAVSASINVYLLNVARIHTTRLEDAIELKKPKKKASKTAVSVPKAVVVKDSETTKSSEILHSSSESESEQSSRPLEQVIELYKDGKVKTLVDDEVVSLVTAGKLPLYALEKQLGDNLRAVAIRRKAISDLADAPVLRSNKLPYLHYDYDRVFGACCENVIGYMPLPVGVAGPLIIDGKPYHIPMATTEGCLVASAMRGCKAINLGGGVTTVLTKDGMTRGPCVKFPSLKRAGQCKLWLDSDEGQEEMKKAFNSTSRFARLQHLQTALAGDLLFIRFRTVTGDAMGMNMISKGVEYALKQMTEVFGWDDMMVVSVSGNYCTDKKPAAVNWINGRGKSVVAEASIPKDAVVKVLKSSVKAVVDVNVNKNLIGSAMAGSVGGFNAQAANMVTAVYLALGQDPAQNVESSNCITLMTETEDGDLKVSVSMPSIEVGTIGGGTILDPQGSMLELLGVRGPADVPGENARQLAKIVASIVLSGELSLVSALAAGHLVQSHMQHNRAAAKK

SEQ ID NO: 197 - protein, 628 aa, Gossypium hirsutum
MEASRRSAVKPVIVLKPSKRFPLVEDTPGKASDALPLPLYLTNAVFFTLFFTVVYFLLSRWREKIRASIPLHAVTFPEIVAIFAFVASLIYLLGFFGIDFVQSLIIRPSGDVWSGEDYEEENEVLLHEEDARTVPCGQALDCSVPSLPHMARNVTAQRLFDEKPVRVATEEDARKVSCGQAVDCSLHSLPPRPPIVTSQKLFHEKTVIVTTEEDEEIIKSVVAGTLPSYSLESKLGDCKRAAAIRREALQRLTGRSLSGLPLDGFDYESILGQCCEMPVGYVQIPVGIAGPLLLNGREYSVPMATTEGCLVASTNRGCKAIHLSGGATSILLKDGMTRAPVVRFSTAKRAAELKFYLEDPENFDTLAVVFNRSSRFGRLQSIKCAIAGKNLYLRFTCSTGDAMGMNMVSKGVQNVLDFLQTDFPDMDVIGISGNFCSDKKPAAVNWIEGRGKSVVCEAIIEGDVVRKVLKTSVESLVELNMLKNLTGSAMAGALGGFNAHASNIVTAIYIATGQDPAQNVESSHCITMMEAVNDGKDLHISVTMPSIEVGTVGGGTQLASQSACLNLLGVKGASKDVAGANSRMLATIVTGAVLAGELSLMSALAAGQLVKSHMKYNRSSKDMSNLSS

SEQ ID NO: 198 - protein, 585 aa, Gossypium hirsutum
METHRRSSTNSIRSHKPARPIALEDDSTKASDALPLPLYLTNAVFFTLFFSAVYFLLCRWREKIRSSTPLHVVTFSEIVAILASVASFIYLLGFFGIDFVQSLVLRPSADVWATEDDEVESEVLLRNEDARHVPCGQALDRSIRSLQPPEPIVTAEKVFDEMPVTVMTEEDEEIIRSVVCGMTPSYSLESKLDDCKRAAAIRREALQRITGKSLSGLPLDGFDYESILGQCCEMPVGYEQIPVGIAGPLLLNGREYSVPMATTEGCLVASTNRGCKAIHLSGGATSVLLRDGMTRAPVVRFGTAKRAADLKLYLEDPENFETLACVFNRSSRFARLQSIKCAIAGKNLYLRFSCFTGDAMGMNMVSKGVQNVLDFLQTDFPDMDVIGISGNFCSDKKPAAVNWIEGRGKSVVCEAIINGDVVTKVLKTSVESLVELNMLKNLTGSAMAGALGGFNAHASNIVTAVYIATGQDPAQNVESSHCITMMEAVNGGKDLHVSVTMPSIEVGTVGGGTQLASQSACLNLLGVKGASKESPGANSILLATIVAGAVLAGELSLMSALAAGQLVKSHMKYNRSSKDVSKVSS

SEQ ID NO: 199 - protein, 1045 aa, Saccharomyces cerevisiae
MSLPLKTIVHLVKPFACTARFSARYPIHVIVVAVLLSAAAYLSVTQSYLNEWKLDSNQYSTYLSIKPDELFEKCTHYYRSPVSDTWKLLSSKEAADIYTPFHYYLSTISFQSKDNSTTLPSLDDVIYSVDHTRYLLSEEPKIPTELVSENGTKWRLRNNSNFILDLHNIYRNMVKQFSNKTSEFDQFDLFIILAAYLTLFYTLCCLFNDMRKIGSKFWLSFSALSNSACALYLSLYTTHSLLKKPASLLSLVIGLPFIVVIIGFKHKVRLAAFSLQKFHRISIDKKITVSNIIYEAMFQEGAYLIRDYLFYISSFIGCAIYARHLPGLVNFCILSTFMLVFDLLLSATFYSAILSMKLEINIIHRSTVIRQTLEEDGVVPTTADIIYKDETASEPHFLRSNVAIILGKASVIGLLLLINLYVFTDKLNATILNTVYFDSTIYSLPNFINYKDIGNLSNQVIISVLPKQYYTPLKKYHQIEDSVLLIIDSVSNAIRDQFISKLLFFAFAVSISINVYLLNAAKIHTGYMNFQPQSNKIDDLVVQQKSATIEFSETRSMPASSGLETPVTAKDIIISEEIQNNECVYALSSQDEPIRPLSNLVELMEKEQLKNMNNTEVSNLVVNGKLPLYSLEKKLEDTTRAVLVRRKALSTLAESPILVSEKLPFRNYDYDRVFGACCENVIGYMPIPVGVIGPLIIDGTSYHIPMATTEGCLVASAMRGCKAINAGGGATTVLTKDGMTRGPVVRFPTLIRSGACKIWLDSEEGQNSIKKAFNSTSRFARLQHIQTCLAGDLLFMRFRTTTGDAMGMNMISKGVEYSLKQMVEEYGWEDMEVVSVSGNYCTDKKPAAINWIEGRGKSVVAEATIPGDVVKSVLKSDVSALVELNISKNLVGSAMAGSVGGFNAHAANLVTALFLALGQDPAQNVESSNCITLMKEVDGDLRISVSMPSIEVGTIGGGTVLEPQGAMLDLLGVRGPHPTEPGANARQLARIIACAVLAGELSLCSALAAGHLVQSHMTHNRKTNKANELPQPSNKGPPCKTSALL

SEQ ID NO: 200 - protein, 410 aa, Streptomyces carbophilus
MTEMTEKATTFLTSQEAPAFPADRTCPYQLPTAYSRLRDEPDALRPVTLYDGRRAWVVTKHEAARRLLADPRLSSDRLHADFPATSPRFKAFRQGSPAFIGMDPPEHGTRRRMTISEFTVKRIKGMRPDVERIVHGFIDDMLAAGPTADLVSQFALPVPSMVICHMLGVPYADHEFFQDASKRLVQAVDADSAVAARDDFERYLDGLITKLESEPGTGLLGKLVTHQLADGEIDRAELISTALLLLVAGHETTASMTSLSVITLLEHPDQHAALRADPSLVPGAVEELLRVLAIADIAGGRIATADIEIDGQLIRAGEGVIVTNSIANRDSSVFENPDRLDVHRSARHHLSFGYGVHQCLGQNLARLELEVILTVLFDRIPTLRLAVPVEQLTLRPGTTIQGVNELPVTW

SEQ ID NO: 201 - protein, 574 aa, Solanum tuberosum
MDVRRRPVKPLYPSEHISSGEPLKPHNQDSSVKASDALPLPLYLTNGLFFTMFFSVMYFLLHRWREKIRNGIPLHVLNFSELVAMVSLIASVIYLLGFFGIGFVQSFVSKGNNDSWDVEDESPEQFIDRTVTPPPVRRNIPMKSVPVAEKTAQIITPFSSEDDEVVIKSVVEGRIPSYSLESKLGDCKRAAFIRKEALQRSSGKSLEGLPLDGFDYESILGQCCEMPIGYIQIPVGIAGPLLLNGKEFSVPMATTEGCLVASTNRGCKAIYVSGGATSVLFRDAMTRAPVVRFGSAKRAAELKFFVEDPMNFETLSVVFNKSSRFARLQNIQCAIAGKNLYMRFSCSTGDAMGMNMVSKGVQNVLDYLQNEYPDMDIIGISGNYCSDKKPAAVNWIEGRGKSVVCEAIIKEDVVKKVLKTEVATLVELNMLKNLTGSAMAGALGGFNAHASNIVSAVYLATGQDPAQNIESSHCITMMEAVNDGKDLHISVTMPSIEVGTVGGGTQLASQSACLNLLGVKGANREAPGSNARLLATIVAGSVLAGELSLMSAISAGQLVKSHMKYNRSCKDVTK

SEQ ID NO: 202 - protein, 595 aa, Solanum tuberosum
MDVRRRSEKPVYPSKVFGADEKPLKPHNNQQQEDNNTLLIDASDALPLPLYLTNGLFFTMFFSVMYFLLSRWREKIRNSTPLHVVTLSELGAIVSLIASVIYLLGFFGIGFVQTFVSRGNNDSWDENDEEFLLKEDSRCGPATTLGCAIPAPPARQISPMAPPQPAMSMVEKPSPLITPASSEEDEEIINSVVQGKFPSYSLVIQLGDVSAAASLRKEVMQRITGKSLEGLPLEGFTYESILGQCCEMPIGYVQIPVGIAGPLLLNGKEFSVPMATTEGCLVASTNRGCKAIYASGGATCIVLRDGMTRAPCVRFGTAKRAAELKFFVEDPIKFETLANVFNQSSRFGRLQRIQCAIAGKNLYMRFVCSTGDAMGMNMVSKGVQNVLDYLQNEYPDMDVIGISGNFCSDKKPAAVNWIEGRGKSVVCEAIITEEVVKKVLKTEVAALVELNMLKNLTGSAMAGALGGFNAHASNIVSAVFIATGQDPAQNIESSHCITMMEAVNDGKDLHISVTMPSIEVGTVGGGTQLASQSACLNLLGVKGANREAPGSNARLLATVVAGSVLAGELSLMSAISAGQLVNSHMKYNRSTKASS

SEQ ID NO: 203 - protein, 1053 aa, Schizosaccharomyces pombe
MIYKLAARYPIQVIAIVGILVSMAYFSFLEALTQEDFPVLIRALKRFGILDGFPNTRLPNEMILKLSSVQGEDASVWEQIPAAELGGEGFVDFDITQWYYPANAKVDVAQLVEPYRNDCIFHDASGACHFFFKEVGNWTVSSIALPSNLANPPIDYFLDSSSTVIQRILPAIREHGISWSWLLQLIARTWMNTLKIASQASKTELLIVGTAYACMLISIVSLYLKMRRLGSKFWLFFSVLLSTLFSVQFAMTLVRASGVRISLVSLIESLPFLINVVALDKAAELTRQVITRCSVSDSHSPMHEDIAKACRNAAPPILRHFSFGIVVLAIFSYCNFGIKQFFLFAAVMIYDLLLLFSFFVAILTLKLEMRRYNAKDDVRKVLIEEGLSESTARHVADGNDSSATTSAGSRYFKVRYGTKIILFIFIAFNLFELCSIPFKHYAATSAAAARLIPLVRSQYPDFKSQRLLDDGVFDDVLSAISSMSNIESPSVRLLPAVFYGAELSSTSFLSTIHSFINNWSHYISASFLSKWIVCALSLSIAVNVFLLNAARLNSIKEEPEKKVVEKVVEVVKYIPSSNSSSIDDIQKDEIAQESVVRSLEECITLYNNGQISTLNDEEVVQLTLAKKIPLYALERVLKDVTRAVVIRRTVVSRSSRTKTLESSNCPVYHYDYSRVLNACCENVIGYMPLPLGVAGPLIIDGKPFYIPMATTEGALVASTMRGCKAINAGGGAVTVLTRDQMSRGPCVAFPDLTRAGRAKIWLDSPEGQEVMKKAFNSTSRFARLQHIKTALAGTRLFIRFCTSTGDAMGMNMISKGVEHALVVMSNDAGFDDMQVISVSGNYCTDKKPAAINWIDGRGKSVIAEAIIPGDAVKSVLKTTVEDLVKLNVDKNLIGSAMAGSVGGFNAHAANIVTAVYLATGQDPAQNVESSNCITLMDNVDGNLQLSVSMPSIEVGTIGGGTVLEPQGAMLDLLGVRGAHMTSPGDNSRQLARVVAAAVMAGELSLCSALASGHLVKSHIGLNRSALNTPAMDSSAKKPATDALKSVNSRVPGR

SEQ ID NO: 204 - protein, 856 aa, Blattella germanica
MVGRLFRAHGQFCASHPWEVIVATLTLTVCMLTVDQRPLGLPPGWGHNCITLEEYNAADMIVMTLIRCVAVLYSYYQFCHLQKLGSKYILGIAGLFTVFSSFVFSSSVINFLGSDVSDLKDALFFFLLLIDLSKATVLAQFALSSRSQDEVKHNIARGIAMLGPTITLDTVVETLVIGVGMLSGVRRLEVLCCFACMSVIVNYVVFMTFYPACLSLILELSRSGESGRPAWHDKSLIIKALHEEDQKPNPVVQRVKVIMSAGLMLVHAHRWVRCLSIALWPDLTSLRYFCTHCDTGVSYSRWSFASEGEELPTVKLVTGDSVVNSNSTDDAQLHYYIMRWLTVSADHIVILILLLALAVKFVFFETRDELTTTRGMDGWVEVSSPVEHKYVQTEQPSCSAPEQPLEEPPASNRSIDECLSVCKSDVGAQALSDCEVMALVTSGHIAGYQLEKVVRNPERGVGIRRQILTKTADLKDALDNLPYKNYDYLKVMGACCENVIGYMPVPVGVAGPLNLDGRLVHVPLATTEGCLVASTNRGMRALMRCGVTSRIVADGMTRGPVVRFPNIDRASEAMLWMQVPYNFEQIKKNFDSTSRFARLSKIHIRVAGRHLFIRFIATTGDAMGMNMLSKGTEVALAYVQQVYPDMEILSLSGNFCTDKKPAAVNWIEGRGKSVVCEAIVPADIIKSVLKTSVQALMDVNITKNLIGSAVAGSIGGFNAHAANIVTAIFIATGQDPAQNVGSSNCMTLMEPWGEDGKDLYVSCTMPSIEIGTIGGGTVLPPQAACLDMLGVRGANEMCPGENANTLARIVCGTVLAGELSLMSALAAGHLVKSHMRHNRSSVSTSGSEPSTPACKS

SEQ ID NO: 205 - protein, 277 aa, Sphaceloma manihoticola
MAAGFPGYALEKTLEDKTRAVKIRRAMIARTPATTKHSRLLESSNLPYQHFDYDRVFGACCENVIGYMPLPVGVAGPLTIDGESYFLPMATTEGVLVASTSRGCKAINAGGGAVTVLTADGMTRGPCVGFETLARAAAAAKLWLDSEEGQKVMKDAFNSTSRFARLQQLKTSLAGTYVYIRFKTTTGEAMGMNMISKGVEKALDVMAKESGFEDMAIISVSGNFCTDKKPAAINWIDGRGKSVVAEAIIPGDVVRSVLKSDVNALVELNVSKNLIGS

SEQ ID NO: 206 - protein, 583 aa, Raphanus sativus
MDIRRRPPKPPVNNPNRFSNDNDDQPRTKASDALPLPLYLTNAVFFTLFFSVAYYLLRRWRDKIRHSTPLHVITITELGALLALVASFIYLLGFFGIDFVQSFISRADTNNEFEDHRLVTCLPRGDVEVWWCHVPMQITSLKTTASSRAPRGGRRVVDPTLPEEDEEIVKSVIRGVIPSYSLESSLGECKRAAAIRREALQRITGRSIEGLPLEGFDYESILGQCCEMPVGYVQIPVGIAGPLLLDGCEYSVPMATTEGCLVASTNRGCKAMYVSGGGTSTVVKDGMTRAPVVRFASARRASELKFYLEDLENFDTLAVVFNRSSRFARLQSVKCTLAGKNAYVRFSCSTGDAMGMNMVSKGVQNVLEFLTDDFPDMDVIGISGNFCSDKKPAAVNWIEGRGKSVVCEAVIRGEIVNKVLKTSVAALVELNMLKNLTGSAVAGSLGGFNAHASNIVSAVFIATGQDPAQNVELSQCITMMEAVNDGKDIHVSVTMPSIEVGTVGGGTQLASQSACLNLLGVKGASTESPGMNSRTLATIVAGAVLAGELSLMSAIAAGQLVKSHMKYNRSSRDISGAMTATTT

SEQ ID NO: 207 - protein, 976 aa, Gibberella fujikuroi
MDHEGCQGQHPQQCCQWVSNAWSEFLDLLKNAETLDIVIMLLGYIAMHLTFVSLFLSMRKMGSKFWLGICTLFSSVFAFLFGLVVTTKLGVPISVILLSEGLPFLVVTIGFEKNIVLTRAVMSHAIEHRRIQAQNSKSGKRSPDGSTQNMIQYAVQAAIKEKGFEIIRDYAIEIVILVIGAASGVQGGLQQFCFLAAWTLFFDFILLFTFYTAILSIKLRSTVSSVMSICVWPLRMMASRRVAENVAKGDDELNRVRGDAPLFGRKSSSIPKFKVLMILGFIFVNIVNICSIPFRNPSSMSTIRTWASSLGGVIAPLSVDPFKVASNGLDAILPTAKSNNRPTLVTVLTPIKYELEYPSIHYALGSAASNPAYNDAFHHHFQGYGVGGRMVGGILKSLEDPVLSKWIVIALALSVALNGYLFNVARWGIKDPNVPEHNIDRNELARAREFNDTGSATLPLGEYVPPTPMRTQPSTPAITDDEAEGLHMTKARPANLPNRSNEELEKLLSENALREMTDEEVISLSMRGKIPGYALEKTLGDFTRAVKIRRSIIARNKAAADITHSLDRSKLPYENYNWERFFGACCENVIGYMPLPVGVAGPLVIDGQSYFIPMATTEGVLVASASRGCKAINSGGGAITVLTADGMTRGPCVAFETLERAGAAKLWLDSEAGQDMMKKAFNSTSRFARLQSMKTALAGTNLYIRFKTTTGDAMGMNMISKGVEHALSVMANDGGFDDMQIISVSGNYCTDKKAAALNWIDGRGKGVVAEAIIPGEVVRSVLKSDVDSLVELNVAKNLIGSAMAGSVGGFNAHAANIVAAIFLATGQDPAQVVESANCITIMKNLNGALQISVSMPSLEVGTLGGGTILEPQGAMLDILGVRGSHPTNPGDNARRLARIIGAAVLAGELSLCSALAAGHLVRAHMQHNRSAAPSRSTTPGSSHDARLTGHDQCPRALSVNNVDERRRYSEVKAIDE

SEQ ID NO: 208 - protein, 244 aa, Rattus norvegicus
  MISC_FEATURE (1)..(244): x equals unknown
PIRSPKRGTSMGMNMISKGTEKALLKLQEFFPELQILAVSGNYCTDKKPAAINWIEGRGKTVVCEAVIPAKVVREVLKSTTEAMVDVNINKNLVGSAMAGSIGGYNAHAANIVTAIYIACAQDAAQNVGSSNCITLMEASGPXXEDLXXSXXMPSIEIGTVGGGTNLLPQQACLQMLGVQGACKDNPGENARQLARIVCGTVMAGELSLMAALAAGHLVRSHMVHNRSKINLQDLQGTCTKKAA

SEQ ID NO: 209 - protein, 592 aa, Arabidopsis thaliana
MDLRRRPPKPPVTNNNNSNGSFRSYQPRTSDDDHRRRATTIAPPPKASDALPLPLYLTNAVFFTLFFSVAYYLLHRWRDKIRYNTPLHVVTITELGAIIALIASFIYLLGFFGIDFVQSFISRASGDAWDLADTIDDDDHRLVTCSPPTPIVSVAKLPNPEPIVTESLPEEDEEIVKSVIDGVIPSYSLESRLGDCKRAASIRREALQRVTGRSIEGLPLDGFDYESILGQCCEMPVGYIQIPVGIAGPLLLDGYEYSVPMATTEGCLVASTNRGCKAMFISGGATSTVLKDGMTRAPVVRFASARRASELKFFLENPENFDTLAVVFNRSSRFARLQSVKCTIAGKNAYVRFCCSTGDAMGMNMVSKGVQNVLEYLTDDFPDMDVIGISGNFCSDKKPAAVNWIEGRGKSVVCEAVIRGEIVNKVLKTSVAALVELNMLKNLAGSAVAGSLGGFNAHASNIVSAVFIATGQDPAQNVESSQCITMMEAINDGKDIHISVTMPSIEVGTVGGGTQLASQSACLNLLGVKGASTESPGMNARRLATIVAGAVLAGELSLMSAIAAGQLVRSHMKYNRSSRDISGATTTTTTTT

SEQ ID NO: 210 - protein, 462 aa, Artificial Sequence
  Non_Ter
  NON_TER (1)..(462): Non_Ter
MVLVTQEPEIELPREPRPNEECLQILGNAEKGAKFLSDAEIIQLVNAKHIPAYKLETLMETHERGVSIRRQLLSKKLSEPSSLQYLPYRDYNYSLVMGACCENVIGYMPIPVGVAGPLCLDEKEFQVPMATTEGCLVASTNRGCRAIGLGGGASSRVLADGMTRGPVVRLPRACDSAEVKAWLETSEGFAVIKEAFDSTSRFARLQKLHTSIAGRNLYIRFQSRSGDAMGMNMISKGTEKALSKLHEYFPEMQILAVSGNYCTDKKPAAINWIEGRGKSVVCEAVIPSKVVREVLKTTTEAMIEVNINKNLVGSAMAGSIGGYNAHAANIVTAIYIACGQDAAQNVGSSNCITLMEASGPTNEDLYISCTMPSIEIGTVGGGTNLLPQQACLQMLGVQGACKDNPGENARQLARIVCGTVMAGELSLMAALAAGHLVKSHMIHNRSKINLQDLQGACTKKTA

SEQ ID NO: 211 - protein, 115 aa, Artificial Sequence
  NON_TER
  NON_TER (1)..(115)
SSNCITLMEASGPTNEDLYISCTMPSIEIGTVGGGTNLLPQQACLQMLGVQGACKDNPGENARQLARIVCGTVMAGELSLMAALAAGHLVKSHMIHNRSKINLQDLQGACTKKTA

SEQ ID NO: 212 - protein, 102 aa, Artificial Sequence
  NON_TER
  NON_TER (1)..(102): NON_TER
LHEYFPEMQILAVSGNYCTDKKPAAINWIEGRGKSVVCEAVIPSKVVREVLKTTTEAMIEVNINKNLVGSAMAGSIGGYNAHAANIVTAIYIACGQDAAQNV

SEQ ID NO: 213 - protein, 119 aa, Artificial Sequence
  NON_TER
  NON_TER (1)..(119): NON_TER
FQVPMATTEGCLVASTNRGCRAIGLGGGASSRVLADGMTRGPVVRLPRACDSAEVKAWLETSEGFAVIKEAFDSTSRFARLQKLHTSIAGRNLYIRFQSRSGDAMGMNMISKGTEKALS

SEQ ID NO: 214 - protein, 123 aa, Artificial Sequence
  NON_TER
  NON_TER (1)..(123): NON_TER
MVLVTQEPEIELPREPRPNEECLQILGNAEKGAKFLSDAEIIQLVNAKHIPAYKLETLMETHERGVSIRRQLLSKKLSEPSSLQYLPYRDYNYSLVMGACCENVIGYMPIPVGVAGPLCLDEK

SEQ ID NO: 215 - protein, 562 aa, Arabidopsis thaliana
MEDLRRRFPTKKNGEEISNVAVDPPLRKASDALPLPLYLTNTFFLSLFFATVYFLLSRWREKIRNSTPLHVVDLSEICALIGFVASFIYLLGFCGIDLIFRSSSDDDVWVNDGMIPCNQSLDCREVLPIKPNSVDPPRESELDSVEDEEIVKLVIDGTIPSYSLETKLGDCKRAAAIRREAVQRITGKSLTGLPLEGFDYNSILGQCCEMPVGYVQIPVGIAGPLLLDGVEYSVPMATTEGCLVASTNRGFKAIHLSGGAFSVLVKDAMTRAPVVRFPSARRAALVMFYLQDPSNFERLSLIFNKSSRFARLQSITCTIAGRNLYPRFACSTGDAMGMNMVSKGVQNVLDFVKSEFPDMDVIGISGNYCSDKKASAVNWIEGRGKHVVCEAFIKAEIVEKVLKTSVEALVELNTLKNLVGSAMAGSLGGFNAHSSNIVSAVFIATGQDPAQNVESSHCMTMILPDGDDLHISVSMPCIEVGTVGGGTQLASQAACLNLLGVKGSNNEKPGSNAQQLARIVAGSVLAGELSLMSAIAAGQLVKSHMKYNRSSRDIGPSSQVNR

SEQ ID NO: 216 - protein, 224 aa, Mus musculus
EKALLKLQEFFPDMQILAVSGNYCTDKKPAAINWIEGRGKTVVCEAVIPAKVVREVLKTTTEAMVDVNINKNLVGSAMAGSIGGYNAHAANIVTAIYIACGQDAAQNVGSSNCITLMEASGPTNEDLYISCTMPSIEIGTVGGGTNLLPQQACLQMLGVQGACKDNPGENARQLARIVCGTVMAGELSLMAALAAGHLVRSHMVHNRSKINLQDLQGTCTKKAA

SEQ ID NO: 217 - protein, 887 aa, Mesocricetus auratus
MLSRLFRMHGLFVASHPWEVIVGTVTLTICMMSMNMFTGNNKICGWNYECPKFEEDVLSSDIIILTITRCIAILYIYFQFQNLRQLGSKYILGIAGLFTIFSSFVFSTVVIHFLDKELTGLNEALPFFLLLIDLSRASALAKFALSSNSQDEVRENIARGMAILGPTFTLDALVECLVIGVGTMSGVRQLEIMCCFGCMSVLANYFVFMTFFPACVSLVLELSRESREGRPIWQLSHFARVLEEEENKPNPVTQRVKMIMSLGLVLVHAHSRWIADPSPQNSTTEHSKVSLGLDEDVSKRIEPSVSLWQFYLSKMISMDIEQVVTLSLAFLLAVKYIFFEQAETESTLSLKNPITSPVATPKKAPDNCCRREPVLSRRNEKLSSVEEEPGVNQDRKVEVIKPLVAETESTSRATFVLGASGGCSPVALGTQEPEIELPSEPRPNEECLQILESAEKGAKFLSDAEIIQLVNAKHIPAYKLETLMETHERGVSIRRQLLSTKLPEPSSLQYLPYRDYNYSLVMGACCENVIGYMPIPVGVAGPLCLDGKEYQVPMATTEGCLVASTNRGCRAIGLGGGASSRVLADGMTRGPVVRLPRACDSAEVKAWLETPEGFAVIKDAFDSTSRFARLQKLHVTMAGRNLYIRFQSKTGDAMGMNMISKGTEKALVKLQEFFPEMQILAVSGNYCTDKKPAAVNWIEGRGKTVVCEAVIPARVVREVLKTTTEAMIDVNINKNLVGSAMAGSIGGYNAHAANIVTAIYIACGQDAAQNVGSSNCITLMEASGPTNEDLYISCTMPSIEIGTVGGGTNLLPQQACLQMLGVQGACKDNPGENARQLARIVCGTVMAGELSLMAALAAGHLVRSHMVHNRSKINLQDLQGTCTKKAA

SEQ ID NO: 218 - protein, 1045 aa, Saccharomyces cerevisiae; identical to SEQ ID NO: 199

SEQ ID NO: 219 - protein, 592 aa, Arabidopsis thaliana; identical to SEQ ID NO: 209

SEQ ID NO: 220 - protein, 932 aa, Strongylocentrotus purpuratus
MLSRLFLAQGRFCSSHPWEVIVCTLTLTICMLSMNYFTGLPRICGWNYECAPQVKESSLSSDVLVMCIMRTLAVAYLYLQFTKLRTTGSKYILGIAGLFTIFSSFLFSSAVIHLFGLELTGLNEALPFFLLLIDLTKASALTKFALSSTTQNEVVDNIARGMAILGPTITLDTVVTTLVISIGTMSSIRKMEVFCCFGILSLIANYFVFMTFFPACLSLVLELSNSNKYGRPVWHLGRFAEVLEEEEDRKPNPVVQRVKMIMRTGLVLVHAHSYWLASNDTELMSRDMLYDGNLLTDKKIDPTMPLWEFYATRLWPPTLDYILTAILATVLASHYIFFSDLATYPEKRVSIMEGHEVVNPGSDHEDASEVETIGTLSSSPSTSDVRVIESMTSRTQACQTDPVTASPRNSRSSSPVSSHSVKPARFTIGSSGSGSEDEEEEVIKEEEVEWVLETELKAPRPMPELLEILNVGKGPNALTDDEVQLLVGAKHIPAYKLENILDNPERGVAVRRQIISKLLPITDALEKLPYASYDYSFVSGACCENVIGYMPVPVGVAGPLLLDGQEFQVPMATTEGCLVASTNRGCRALRSAGGIHSVLIGDGMTRGPLVRLPSAQEAGAIKQWLEVPENFAAIKERFESTSRFAKLKSIQTALAGRYMFLRFKALTGDAMGMNMISKGTEQALHALQTMFPNIEIMSLSGNYCTDKKVAAINWIEGRGKSVVCEATVPAHIVQQVLKTSASALVDLNIHKNLVGSAMAGSIGGFNAHAANIVTAIYIATGQDAAQNIASSNCMTLMETRGPKGGDLYLSCTMPSIELGTVGGGTVLPPQSACLQMMDVKGSNIHGSGLNASQLARIVCATVMAGELSLMSALAAGHLVKSHMKHNRSALNIASPLPSIDEVATHRRSKSVDFSALKESSAAAPGTCTANAS

SEQ ID NO: 221 - protein, 948 aa, Schistosoma mansoni
MLKILNTVLLFFDCFSTGTFFVLLIYLFTRLRTHLLHFSSSNCHLDVIIYQSRAVIIFLVVFVYFIGVLTCKINDKILVHTMLRNKRQLNTLFYTLILFTFALCSLSSVLFVPYTSFAIFLLSTSVFLLFSDLSVFFIVLEYYLLEIELVNYEHAKRHCLLSHLFSNQLFVDHMLGMFLKTSLFSISTTSKYAYLESIFKCTLMEQIIYIMIVFVFLPSFMRIFASYAKRMYGEQKKCLVSNKGVSSSTRKRRHSYSSGHSYVEYRRMSVHNLIGYVVNPNCHYKCWSTTFVIFVSLIILHLNNRYSERISSFKHNSSENEVFPVLYHITAYEVTSIFHFIYNIFHVINANLVVYLFLGLFLFKRIRLNKPINSQLRNLNIPKIKETLISDQVKQSPVLPKFSKKLNDIPLQSRKRIYCLHKDDDYIDRNDSSSVSTFSNTCKNSNERPSNVLDLDMLTEKIKQGLGHELSDTEILQLLSHGRLKTRELESVVRNPFRAVELRRLDLSTFLNNPHIIERIPYKDYDYRLVYGQCCEEVIGYMPIPVGKIGPLLLDGRSHYIPLATTEGCLVASTNRGCRAIFLAGGIKSVVYRDQMTRAPVVWFPSIIDSVKCIAWIDSEEGFQTLKSAFDKTSAHVNLLSVFACPAGRYIHIRFAARTGDAMGMNMVSKATDSALHCLKKYFSNMQVISLSGNMCTDKKPATINTILGRGKSVIAEAHLSADVLAQVLHTNAQRLARLTHSKNWIGSAMAGCPGMMGCNAHAANIIAGMFAATGQDLAQVVDSSSCLTQLEVDLSDDSLVASVTMPCLEVGTVGGGTRLSGQRACLDLLDLSVDRPTEHLSRIIAGTVLAAELSLMAALDTDDLVKAHMHFNRAKQSTNSHSCSHSTTTDNNDNISNIYDNHNVALSSKIPVTDNSDIRESVHSLHVKPFPVKSDLSVNPEISHYTM

SEQ ID NO: 222 - protein, 44 aa, Pseudomonas mevalonii
HARNIAVVAGARGDEVDWVARQLVEYHDVRADRAVAVLKQKRGQ

SEQ ID NO: 223 - protein, 428 aa, Pseudomonas mevalonii
MSLDSRLPAFRNLSPAARLDHIGQLLGLSHDDVSLLANAGALPMDIANGMIENVIGTFELPYAVASNFQINGRDVLVPLVVEEPSIVAAASYMAKLARANGGFTTSSSAPLMHAQVQIVGIQDPLNARLSLLRRKDEIIELANRKDQLLNSLGGGCRDIEVHTFADTPRGPMLVAHLIVDVRDAMGANTVNTMAEAVAPLMEAITGGQVRLRILSNLADLRLARAQVRITPQQLETAEFSGEAVIEGILDAYAFAAVDPYRAATHNKGIMNGIDPLIVATGNDWRAVEAGAHAYACRSGHYGSLTTWEKDNNGHLVGTLEMPMPVGLVGGATKTHPLAQLSLRILGVKTAQALAEIAVAVGLAQNLGAMRALATEGIQRGHMALHARNIAVVAGARGDEVDWVARQLVEYHDVRADRAVALLKQKRGQ

SEQ ID NO: 224 - protein, 562 aa, Arabidopsis thaliana; identical to SEQ ID NO: 215

SEQ ID NO: 225 - protein, 887 aa, Mesocricetus auratus
MLSRLFRMHGLFVASHPWEVIVGTVTLTICMMSMNMFTGNNKICGWNYECPKFEEDVLSSDIIILTITRCIAILYIYFQFQNLRQLGSKYILGIAGLFTIFSSFVFSTVVIHFLDKELTGLNEALPFFLLLIDLSRASALAKFALSSNSQDEVRENIARGMAILGPTFTLDALVECLVIGVGTMSGVRQLEIMCCFGCMSVLANYFVFMTFFPACVSLVLELSRESREGRPIWQLSHFARVLEEEENKPNPVTQRVKMIMSLGLVLVHAHSRWIADPSPQNSTTEHSKVSLGLDEDVSKRIEPSVSLWQFYLSKMISMDIEQVVTLSLAFLLAVKYIFFEQAETESTLSLKNPITSPVATPKKAPDNCCRREPVLSRRNEKLSSVEEEPGVNQDRKVEVIKPLVAETESTSRATFVLGASGGCSPVAKGTQEPEIELPSEPRPNEECLQILESAEKGAKFLSDAEIIQLVNAKHIPAYKLETLMETHERGVSIRRQLLSTKLPEPSSLQYLPYRDYNYSLVMGACCENVIGYMPIPVGVAGPLCLDGKEYQVPMATTEGCLVASTNRGCRAIGLGGGASSRVLADGMTRGPVVRLPRACDSAEVKAWLETPEGFAVIKDAFDSTSRFARLQKLHVTMAGRNLYIRFQSKTGDAMGMNMISKGTEKALVKLQEFFPEMQILAVSGNYCTDKKPAAVNWIEGRGKTVVCEAVIPARVVREVLKTTTEAMIDVNINKNLVGSAMAGSIGGYNAHAANIVTAIYIACGQDAAQNVGSSNCITLMEASGPTNEDLYISCTMPSIEIGTVGGGTNLLPQQACLQMLGVQGACKDNPGENARQLARIVCGTVMAGELSLMAALAAGHLVRSHMVHNRSKINLQDLQGTCTKKAA

SEQ ID NO: 226 - protein, 34 aa, Rattus norvegicus
VHNRSKINLQDLTPPLAVGAQEPGIELPSEPRPN

SEQ ID NO: 227 - protein, 1053 aa, Schizosaccharomyces pombe; identical to SEQ ID NO: 203

SEQ ID NO: 228 - protein, 574 aa, Solanum tuberosum; identical to SEQ ID NO: 201

SEQ ID NO: 229 - protein, 18 aa, Solanum tuberosum
MDVRRRPVKPLYPSEHIS

SEQ ID NO: 230 - protein, 82 aa, Solanum tuberosum; identical to SEQ ID NO: 191

SEQ ID NO: 231 - protein, 82 aa, Solanum tuberosum; identical to SEQ ID NO: 193

SEQ ID NO: 232 - protein, 82 aa, Solanum tuberosum; identical to SEQ ID NO: 192

SEQ ID NO: 233 - protein, 82 aa, Solanum tuberosum; identical to SEQ ID NO: 195

SEQ ID NO: 234 - protein, 244 aa, Rattus norvegicus; identical to SEQ ID NO: 208
  MISC_FEATURE (1)..(244): X equals unknown

SEQ ID NO: 235 - protein, 436 aa, Archaeoglobus fulgidus
MQVLRLDRRHYKSGKIRRAMSSRIPGFYKLSVEERLKKVAEFAGLSDEEVKAVLSQGLPLDVADRMIENVIGTFELPLGIATNFLIDGKDYLIPMAIEEPSVVAAASNAARMARESGGFTTDYTGSLMIGQIQVTKLLNPNAAKFEVLRQKDEIIERANECDPMLVNLGGGCKDIEARVIDTIMGKMLIVHLIVDVKDAMGANAVNTMCEKVAPFIERITGGKVYLRIISNLAAYRLARAKAVFDKDVIGGEEVVEGIMLAYAFAAADPFRCATHNKGIMNGISALMIATGNDFRAIEAGAHSYAAIGGYKPLTTYEVDRKGNLVGTIEIPMAVGVIGGATKVNPLAKISLKILGVNTAEELARVAAALGLAQNFAALRALATEGIQRGHMELHARNLAIMAGATGDEVDRVVEIMVRDGKIRLDYAKEVLERLRS

SEQ ID NO: 236 - protein, 428 aa, Pseudomonas mevalonii; identical to SEQ ID NO: 223

SEQ ID NO: 237 - protein, 397 aa, Methanothermobacter thermautotrophicus
MSIMDDLMEGRIKLYEIERHVPVDEAVRIRREFIERTCGVKLEHVSNYSIDMERASRRNIENPIGVVQIPLGVAGPLRVRGEHADGEYYVPLATSEGALVASVNRGCSVITRAGGATVRVTGDSMTRAPVIRTGSVVEALQLREWIYENMDALREEAESTTRHGKLVKIDPIIVAGSYVYPRFVYTTGDSMGMNMVTIATERALELLTRETGAHVIALSGNLCTDKKPAAVNLIEGRGKSITAEITVPGEMVESVLKTTPEAVVEVNTAKNLIGSAAAGSMGFNAHYANIIGAIFLATGQDEAHIVEGSLGVTIAEERKGDLYFAVNLPDVPLATVGGGTGLETASECLDIMGVRGGGRVHAFAEIVGGAVLAGELSLMGALAAGHLARAHSELGRG

SEQ ID NO: 238 - protein, 405 aa, Methanococcus jannaschii
MENYNDILEKMLNGEIKPYQLDKMFGSKIATEIRRKFIEKKVGIEFKHICNYSIDEEMAMKKNIENMIGAIQIPLGFAGPLKINGEYAKGEFYIPLATTEGALVASVNRGCSIITKCGGATVRVIDDKMTRAPCLKTKSVVDAIKVRDWIRENFERIKEVAESTTRHGKLIKIEPILIVGRNLYPRFVFKTGDAMGMNMVTIATEKACNFIEGELKKEGIFVKTVAVSGNACVDKKPSGMNLINGRGKSIVAEVFLTEKEVNKYLKTTSQAIAEVNRLKNYIGSAISNSMGFNAHYANIIGAIFLATGQDEAHIVEGSLGITMAEVEDDGLYFSVTLPDVPIGTVGGGTRVETQKECLEMLGCYGDNKALKFAEIVGAAVLAGELSLLGALAAGHLGKAHQELGR

SEQ ID NO: 239 - protein, 403 aa, Haloferax volcanii
MTDAASLADRVREGDLRLHELEAHADADTAAEARRLLVESQSGASLDAVGNYGFPAEAAESAIENMVGSIQVPMGVAGPVSVDGGSVAGEKYLPLATTEGALLASVNRGCSVINSAGGATARVLKSGMTRAPVFRVADVAEAEALVSWTRDNFAALKEAAEETTNHGELLDVTPYVVGNSVYLRFRYDTKDAMGMNMATIATEAVCGVVEAETAASLVALSGNLCSDKKPAAINAVEGRGRSVTADVRIPREVVEERLHTTPERGRELNTRKNLVGSAKAASLGFNAHVANVVAAMFLATGQDEAQVVEGANAITTAEVQDGDLYVSVSIASLEVGTVGGGTKLPTQSEGLDILGVSGGGDPAGSNADALAECIAVGSLAGELSLLSALASRHLSSAHAELGR

SEQ ID NO: 240 - protein, 856 aa, Blattella germanica; identical to SEQ ID NO: 204

SEQ ID NO: 241 - protein, 509 aa, Oryza sativa
MRITNGLAMVSLVLSSCDLVRLCSDRERPLGGREFATVVCQLASVVYLLSLFAHPDAPATTTGDDDDGQGGSRRAAPPEPAPMHGHGGGMMEGDDEEIVAAVASGALPSHRLESRLGDCRRAARLRREALRRVTGRGVEGLPFDGMDYQAILGQCCEMPVGYVQLPVGVAGPLLLDGREYHVPMATTEGCLVASVNRRVQGHLVSGGAFSVLLRDAMSRAPAVKLPCPMRAAELKAFAEAPANFELLAAVFNRSSRFGRLQDIRCALAGRNLYMRFSCITGDAMGMNMVSKGVENVLGYLQNVFPDMDVISVSGNYCSDKKPTAVNWIEGRGKSVVCEAIIKGDVVQKVLKTTVEKLVELNIIKNLAGSAVAGALGGFNAHASNIVTALFIATGQDPAQNVESSQCITMLEEVNDGDDLHISVTMPSIEVGTIGGGTCLASQAACLNLLGVKGSNHGSPGANAGRLATIVAGSVVAGRALLLAALASGHLVKSHMMYNRSSKDVAKAAS

SEQ ID NO: 242 - protein, 596 aa, Solanum tuberosum
MDVRRRPVKPLYTSKDASAGEPLKQQEVSSPKASDALPLPLYLTNGLFFTMFFSVMYFLLVRWREKIRNSIPLHVVTLSELLAMVSLIASVIYLLGFFGIGFVQSFVSRSNSDSWDIEDENAEQLIIEEDSRRGPCAAATTLGCVVPPPPVRKIAPMVPQQPAKVALSQTEKPSPIIMPALSEDDEEIIQSVVQGKTPSYSLESKLGDCMRAASIRKEALQRITGKSLEGLPLEGFDYSSILGQCCEMPVGYVQIPVGIAGPLLLDGREYSVPMATTEGCLVASTNRGCKAIFVSGGADSVLLRDGMTRAPVVRFTTAKRAAELKFFVEDPLNFETLSLMFNKSSRFARLQGIQCAIAGKNLYITFSCSTGDAMGMNMVSKGVQNVLDYLQSEYPDMDVIGISGNFCSDKKPAAVNWIEGRGKSVVCEAIIKEEVVKKVLKTEVAALVELNMLKNLTGSAMAGALGGFNAHASNIVSAVYLATGQDPAQNVESSHCITMMEAVNDGKDLHVSVTMPSIEVGTVGGGTQLASQSACLNLLGVKGANRDAPGSNARLLATIVAGSVLAGELSLMSAISAGQLVKSHMKYNRSIKDISK

SEQ ID NO: 243 - protein, 604 aa, Nicotiana sylvestris
MDVRRRSEKPAYPTKEFAAGEKPLKPHKQQQEQDNSLLIASDALPLPLYLTNGLFFTMFFSVMYYLLSRWREKIRNSTPLHVVTFSELVAIASLIASVIYLLGFFGIGFVQSFVSRDNNDECWDEEDENDEQFLLEEDSRRGPATTLGCTAVPPPPALQIVPMVPPQPSKVAAMSEKPAPLVTPAASEEDEEIIKSVVQGKMPSYSLESKLGDCKRAASIRKEALQRITGKSLEGLPLEGFDYESILGQCCEMPIGYVQIPVGIAGPLLLDGREYSVPMATTEGCLVASTNRGCKAIYASGGATSVLLRDGMTRAPCVRFGTAKRAAELKFFVEDPVKFETLAAVFNQSSRFARLQRIQCAIAGKNLYMRFVCSTGDAMGMNMVSKGVQNVLDYLQNEYPDMDVIGISGNFCSDKKPAAVNWIEGRGKSVVCEAIITEEVVKKVLKTEVAALVELNMLKNLTGSAMAGALGGFNAHASNIVSAVYIATGQDPAQNIESSHCITMMEAVNDGKDLHVSVTMPSIEVGTVGGGTQLASQSACLNLLGVKGANREVPGSNARLLATIVAGSVLAGELSLMSAISAGQLVKSHMKYNRSTKDVTKASS

SEQ ID NO: 244 - protein, 601 aa, Catharanthus roseus
MDSRRRSPTVTAKAAAGELPLAPHEGQNQQPSIPRSSDVLPLPLYLANGVFFTLFFSVMYFLLTRWREKIRNATPLHVVTLSELAALASLIASVIYLVSFFGLDFVQSLIYKPNNEGWEIEEEILMVEDSRNGTNCTTLGCAVPPPSVPKIAPVVPQQPSKMVIIEKPAPLITPQNSEEDEDIIKAVVAGKIPSYSLESKLGDCKRAAGIRREALQRITGKSLEGLPLEGFDYASILGQCCEMPVGYVQLPVGIAGPLLLDGREYMLPMATTEGCLVASTNRGCKAILASGGANSVLLRDGMTRAPVVRFGTAKRAAELKFYMEDTQNFETISVVFNKSSRFAKLQSVQCAIAGKNLYIRFSCSTGDAMGMNMVSKGVQNVLEFLQTDYPDMDVLGISGNFCADKKPAAVNWIEGRGKSVVCEAIIKEEIVKTVLKTEVAALIELNMVKNLAGSAIAGALGGFNAHASNIVSAIFIATGQDPAQNVESSQCITMMEAVNDGKDLHISVTMPSIEVGTVGGGTQLASQSACLNLLGVKGASKDSPGANSRLLATIVAGSVLAGELSLMSAISAGQLVRSHMKYNRSSKDITNIASSQLESDS

SEQ ID NO: 245 - protein, 586 aa, Hevea brasiliensis
MDEVRRRPPKHIVRKDHDGEVLNSFSHGHHLPPLKPSDYSLPLSLYLANALVFSLFFSVAYFLLHRWREKIRKSTPLHIVTFPEIAALICLVASVIYLLGFFGIGFVHSFSRASTDSWDVEEYDDDNIIIKEDTRPTGACAAPSLDCSLSLPTKIHAPIVSTTTTSTLSDDDEQIIKSVVSGSIPSYSLESKLGNCKRAALIRRETLQRMSGRSLEGLPLDGFDYESILGQCCEMAIGYVQIPVGIAGPLLLDGKEYTVPMATTEGCLVASANRGCKAIYASGGATSVLLRDGMTRAPVVRFPTAKRAADLKFFMEDPDNFDTIAVVFNKSSRFARLQSVQCAIAGKNLYMRFSCSTGDAMGMNMVSKAVQNVIDYLQNDFPDMDVIGLTGNFCADKKAAAVNWIEGRGKSVVCEAIIKEEVVKKVLKTNVAALVELNMIKNLTGSAVAGSLGGFNAHASNMVTAVYIATGQDPAQNVESSHCITMMEAVNDGKDLHISVSMPSIELGTVGGGTQLASQSACLNLLGVKGASKDSPGSNSRLLATIVAGSVLAGELSLMSAIAAGQLVNSHMKYNRSAKDVSKITF

SEQ ID NO: 246 - protein, 428 aa, Pseudomonas mevalonii; identical to SEQ ID NO: 223

SEQ ID NO: 247 - protein, 592 aa, Arabidopsis thaliana; identical to SEQ ID NO: 209

SEQ ID NO: 248 - protein, 421 aa, Aeropyrum pernix
MGSSSGQKPRRLEDLVDKLASGSLSHSRLEKELGNANEAALVRRLYLERLTGASLSSVASTILDFQELYGRNIENPIGAVQVPVGVAGPLRINGDYARGDFYIPLATTEGALVASVNRGAKAITLSGGARAKVIKDGMTRAPLLWTPSVYEAHRLAMWVEDRIEDLRSVVAGVTRHGRLQHIYPYIIGNLVWLRLSFSTGDAMGMNMVTISSDRICRYIEENYDGDAKCIALSGNMCTDKKPAAINKILGRGKYVVAEAVIKGEVVKNVLKTTPQNINLVNVTKNLLGSAAAGSHSFNAHFANIIAAIFIATGQDAAQVVESSMGYTWTEVRGEDLYISVTLPSLEVGTVGGGTRLPTQRELLALLGVAGGGNPPGSNALKLAEIIASAVLAGELNLLSAIAAGQLARAHELLGRGGLKIS

SEQ ID NO: 249 - protein, 1068 aa, Aspergillus terreus
MDPVVRKPDPGGVQHRVTKALRAIVGHACRHPIHTLLVTALTAATTHLHVLEGTYQATHREASAWKWQIDDRPKVPEDGQSDFHWALVTLDLPGASVDASIPFLSNTLSGFLGAEQTTPTPDSSPSPDHSALTFRVPYSQLDGFLQAVEIIPSEKEDDSWRLRSPREEGSPRSLGHWLGSSWLSFLHRVHHAETVDLVIIGLSYLAMNMTVVSLFRVMRHLGSRFWLAASVLLSGAFAFVLGLGITTTCDVPVDMLLLFEGIPYLVLTVGFEKPIQLTRAVLCVSEELWGGGQRQVPNGASSDDSRQNQLIPNIIQLAVDREGWYIVRSYLLEIGALALGAVLRPKDSLGHFCFLAAWTLLIDAVLLFTFYATILCVKLEITRIRSPGGLGQVNAKHPSGIFGHKVKSTNITWWKLLTVGGFVLCHFLQLSPFFYRVMGEYMANGTLPPTAVSPFKEAANGLNEIYLTARVEGFETRVTVLPPLQYVLESAGFNISATKRSTFDGVLDGLESPLGRLCLMGALVVSLVLNNHLIHAARWHAWPQARESAVPDGSYLSVPCSATAPEVCTRPPEETEALLKSNQAESLTDDELVELCLRGKIAGYSLEKTLERIAAGSSRSVTRLEAFTRAVRIRRAAVSKTPSTQNLCSGLAESLLPYRDYNYELVHGACCENVVGYLPLPLGVAGPMVIDGQALFIPMATTEGVLVASASRGCKAINAGGGATTMLKGDGMTRGPCLRFPSAQRAAEAQRWVESPLGHEVLAAAFNATSRFARLQTLTVAQAGIYLYIRFRTTTGDAMGMNMISKGVEKALEAMAAEGGFPDMHTVTLSGNFCSDKKSAAINWIGGRGKSVIAEATIPAETVRQVLKTDVDALVELNTAKNLVGSAMAGSLGGFNAHASNLVQAVFLATGQDPAQNVESSSCITTMKNIDGNLHIAVSMPSMEVGTIGGGTILEAQGAMLDLLGVRGAHSTEPGANARRLARIVAAAVLAGELSTCAALAAGHLVNAHMQHNRTSKDAISGTEYGAIRTPVYVVILEHAGDIHFVQIEYKNTYLRRKVPTLSCNLGR

SEQ ID NO: 250 - protein, 560 aa, Oryza sativa; identical to SEQ ID NO: 185

SEQ ID NO: 251 - protein, 604 aa, Capsicum annuum
MDVRRRSEEAVYSSKVFAADEKPLKPHKQQQEEDNTLLIDASDALPLPLYFTNGLFFTMFFSVMYFLLSRWREKIRNSTPLHVVTLSELGAIVSLIASVIYLLGFFGIGFVQTFVARGNNDSWDEEDENDEQFILEEDSRRGPCAAATTLGCAVPTPPAKHIAPIVPQQPAVSIAEKPAPLVTPAASEEDEEIIKSVVQGKIPSYSLESKLGDCKRAASIRKEVLQRITGKSLEGLPLDGFNYESILGQCCEMTIGYVQIPVGIAGPLLLNGREYSVPMATTEGCLVASTNRGCKAIYASGGATSILLRDGMTRAPCVRFGTAKRAAELKFFVEDPINFETLANVFNQSSRFARLQRIQCAIAGKNLHMRFVCSTGDAMGMNMVSKGVQNVLDYLQNEYADMDVIGISANFCSDKKPAAVNWIEGRGKSVVCEAIITEEVVKKVLKTEVAALVELNMLKNLTGSALAGALGGFNAHASNIVSAVYIATGQDPAQNIESSHCITMMEAVNDGKDLHISVTMPSIEVGTVGGGTQLASQSACLNLLGVKGANREAPGSNARLLATIVAGSVLAGELSLMSAISAGQLVNSHMKYNRSTKDVTKASS

SEQ ID NO: 252 - protein, 411 aa, Pyrococcus abyssi
MKTLNVEDIIEKVANGEIKLHQVEKYVNGDKRLATEIRRKALERKLGISLKHIGHYSIDPNELIGRNIENMIGVVQIPMGVAGPLKINGEYAKGEFYIPLATTEGALVASVNRGCSALTEAGGVVTTILDDKMTRAPLIRCPNARRAREVAEWVKENLNYLQEKAVAKVTRHGKLRDVKPFIVGNNLYLRFEFETGDAMGMNMVTIASEEIMKVIEEEFPDVRYLALSGNLCVDKKPNAVNFILGRGKTVVAEAIVPREIVEKKLKTTPELIAEVNYFKNLVGSAQAGSYGFNAHFGNIVGAIFLATGQDEAQITEGSHGITIAEVTPEGDLYISITMPSLEIGTVGGGTRVPTQREALSIMGVAGGGDPPGVNAKKFAEIVAGAVLAGELSLLAAIAAKHLARAHKMLGR

SEQ ID NO: 253 - protein, 411 aa, Pyrococcus abyssi; identical to SEQ ID NO: 252

SEQ ID NO: 254 - protein, 595 aa, Solanum tuberosum; identical to SEQ ID NO: 202

SEQ ID NO: 255 - protein, 833 aa, Agrotis ipsilon
MKVWGAHGEFCARHQWEVIVATLALLACAASVERNGPGNRSEHCAGWARACPGLEAEYQAADAVIMTFVRCAALLYAYYQISNLHKIASKYLLIIAGVFSTFASFIFTSAVASLFWSELASIKDAPFLFLLVADVARGARMAKAGWSAGEDQGKRVGRALALLGPTATLDTLLAVLLVGVGALSGVPRLEHMCTFACLALLVDYLVFVTFYPACLSLVADFASGRKEMSPDSPFSEADLKPNPVVQRVKMIMAAGLLCVHLTSRWPWSSDNGIIEGPTDTLTPTSNDNILLHSYVKWFSVSADYIVIATLLCALIIKFVFFEEQRNWVIDMNDMTVKEVVQEQARSKPKFSVGDDSNSEVSTQTEGVLEDEWPTLSPSSSAAKLNSKKRPMAECLEIYRSEGACVSLSDEEVVMLVEQSHIPLHRLEAVLGDPLRGVRLRRKVVGARFQTELAIKQLPYLNYDYSKVLNACCENVIGYVGVPVGYAGPLVVDGKPYMIPMATTEGALVASTNRGAKAIGIRGVTSVVEDVGMTRAPAIKLPNVVRAHECRQWIDNKDNYAVIKEAFDSTSRFARLQEIHIGVDGATLYLRFRATTGDAMGMNMVSKGAENALKLLKNYFPDMEVISLSGNYCSDKKAAAINWVKGRGKRVVCETTITSDSLRTIFKTDAKTLARCNKIKNLSGSALAGSIGGNNAHAANMVTAIYIATGQDPAQNVTSSNCSTNMEVCGENGEDLYVTCTMPSLEVGTVGGGTILTGQGACLDILGVKGAGARPAENSARLASLICATVLAGELSLMAALVNSDLVKSHMRHNRSTVNVQVQAENITLKVPTL

SEQ ID NO: 256 - protein, 934 aa, Pichia jadinii; identical to SEQ ID NO: 196

SEQ ID NO: 257 - protein, 628 aa, Gossypium hirsutum; identical to SEQ ID NO: 197

SEQ ID NO: 258 - protein, 585 aa, Gossypium hirsutum; identical to SEQ ID NO: 198

SEQ ID NO: 259 - protein, 413 aa, Pyrococcus horikoshii
MGGGNLNIEEIIEKVANGEIKFYQVEKYVNGDKRLATEIRRKALEKRLGIKLHHIGYYSIDPNELIGRNIENMIGVVQIPMGVAGPLKINGEYAKGEFYIPLATTEGALVASVNRGCSALTEAGGVVTTLIDDKMTRAPLIRCPNARRAREVAKWVEENLDYLQEKAVSKVTRHGKLRGVKPFIVGNNLYLRFEFETGDAMGMNMVTIASEEIMKVIEEEFPDVRYLALSGNLCVDKKPNAVNFILGRGKTVIAEAVVPRKIVEKKLKTTPELIAEVNYFKNLVGSAQAGSYGFNAHFANIVGAIFLATGQDEAQITEGAHGITIAEVTPDGDLYISITMPSLEIGTVGGGTRVPSQREALEIMGVAGGGDPPGINAKKFAEIVAGAVLAGELSLLAAIAAKHLARAHKMLGR

SEQ ID NO: 260 - protein, 431 aa, Borrelia burgdorferi
MNLESLSSFMELSKNFRHKSVLEKRQEIKSFLELSYKDFFYNNANEDFLFNMIENYIGYLSFPIGIVKNLKINGKYYSLPIATEESSVVAALNFAAKILENADLRYSLGEVLGISQIYIKSEKDLSKIFVDLGDKIKTWIEPLLTNMNQRGGGFRRLSTRHIKELGIQKLNIYVDTCDAMGANLLNSIAERVAEFIFLEFGYECVLKVLSNDISEFTAKARFVLDFKHLLPGKEDSWNLAKKIELISSIGFYEEERAVTNNKGIMNGITGVCLATFNDTRALEASVHKFASKSGKYFPLSKFYTTDNALVGEIEIPLQVGTKGGVISFNEASILSFKIMNVNSKSEFIGILSCVGLASNFAALRALAFNGIQKGHMRLHVNKILHLLKTKYNISDFEKDKLLLEMERMNIYSFDFAFKILKKIRLENENKV

SEQ ID NO: 261 - protein, 579 aa, Zea mays
MEVRGGVGQGSAARHPPAPEPSRAAARVQAGDALPLPIRHTNLIFSALFAASLAYLMRRWREKIRSSTPLHAVGLAEMLAIFGLVASLIYLLSFFGIAFVQSIVSSGDDDEDFLVGSGSSGSAAAPSRQHAQAPAPCELLGSPAAAPEKMPEDDEEIVASVVAGKVPSYALEARLGDCRRAAGIRREALRRITGRDIEGLPLDGFDYASILGQCCELPVGYVQLPVGVAGPLLLDGRRFYLPMATTEGCLVASTNRGCKAIAESGGATSVVLRDAMTRAPVARFPTARRAAELKAFLEDPANFDTLSVVFNRSSRFARLQGVQCAMAGRNLYMRFSCSTGDAMGMNMVSKGVQNVLDFLQDDFHDMDVISISGNFCSDKKPSAVNWIEGRGKSVVCEAVIGEEVVKKVLKTDVQSLVELNTIKNLAGSAVAGALGGFNAHASNIVTAIFIATGQDPAQNVESSHCITMLEPVNAGRDLHISVTMPSIEVGTVGGGTQLASQSACLDLLGVRGASRDRPGSNARLLATVVAGGVLAGELSLLSALAAGQLVKSHMKYNRSSKDVSSTTATEKTRQREVDV

SEQ ID NO: 262 - protein, 888 aa, HUMAN [sequence omitted]

SEQ ID NO: 263 - protein, 887 aa, Mesocricetus auratus; identical to SEQ ID NO: 170

SEQ ID NO: 264 - protein, 1045 aa, Saccharomyces cerevisiae; identical to SEQ ID NO: 199

SEQ ID NO: 265 - protein, 833 aa, Saccharomyces cerevisiae
MITLLLYLCVICNAIVLIRADSIADPWPEARHLLNTIAKSRDPMKEAAMEPNADEFVGFYVPMDYSPRNEEKNYQSIWQNEITDSQRHIYELLVQSSEQFNNSEATYTLSQIHLWSQYNFPHNMTLAHKYLEKFNDLTHFTNHSAIFDLAVMYATGGCASGNDQTVIPQDSAKALLYYQRAAQLGNLKAKQVLAYKYYSGFNVPRNFHKSLVLYRDIAEQLRKSYSRDEWDIVFPYWESYNVRISDFESGLLGKGLNSVPSSTVRKRTTRPDIGSPFIAQVNGVQMTLQIEPMGRFAFNGNDGNINGDEDDEDASERRIIRIYYAALNDYKGTYSQSRNCERAKNLLELTYKEFQPHVDNLDPLQVFYYVRCLQLLGHMYFTGEGSSKPNIHMAEEILTTSLEISRRAQGPIGRACIDLGLINQYITNNISQAISYYMKAMKTQANNGIVEFQLSKLATSFPEEKIGDPFNLMETAYLNGFIPAIYEFAVMIESGMNSKSSVENTAYLFKTFVDKNEAIMAPKLRTAFAALINDRSEVALWAYSQLAEQGYETAQVSAAYLMYQLPYEFEDPPRTTDQRKTLAISYYTRAFKQGNIDAGVVAGDIYFQMQNYSKAMALYQGAALKYSIQAIWNLGYMHEHGLGVNRDFHLAKRYYDQVSEHDHRFYLASKLSVLKLHLKSWLTWITREKVNYWKPSSPLNPNEDTQHSKTSWYKQLTKILQRMRHKEDSDKAAEDSHKHRTVVQNGANHRGDDQEEASEILGFQMEDLVTMGCILGIFLLSILMSTLAARRGWNVRFNGAQLNANGNRQQEQQQQQQAQGPPGWDFNVQIFAI

SEQ ID NO: 266 - protein, 887 aa, Mesocricetus auratus; identical to SEQ ID NO: 170

SEQ ID NO: 267 - protein, 1176 aa, Phycomyces blakesleeanus
MSLPNHSGSSAFKSFSYIVGTGIKRAAKLSTRNPIEMIVVVLILSSFSYFYLFNLARTSDIFSGTVTRLYPTSVYAPTKDHSFSVVDRTADSTIANNAVKVHLHQIVVSDPKHGVLSRQTLASVLRFQQMAENEIYVPDSTAVNRFAFNKDLCYKTTLPSSYSSHSSDSNSNSNLNSKTSPCFAHSPADIWQDEATLLADKNIRSTIEANLDTAKNVFGDLQLNATYASSVTLSYAFNTTGDYREHLADMWKHKVATLPPADLVSLSNIGQQENVFAWLFIVTRNVIFRVKELIDLADNIDIIVILVGYIMMIATFISLYVNMRAMGSRYTLATAVVFNGFFSFMLALLTVRALGVDVYPVVLAEAIPFLAVTIGFERPFKLTKRVFQFSKETPLTKQEIRTTIMRAVDTVALPIARDCFMEIIVLVLGAKSGISGLEEFCLLSAILLAYDFIIMFTWYTAVLALKLELLRIREINGISADDIKKGTKKSTGYIRRTVIKAFSDDHAAGANTANQKADGPIIGRVKLLMIVGFVVMHIFKFCSAFQSVGPQVNITEPSIAVVLDQLLEQHKASSQASLPLFVQVFPAMPFHVATVNKSFVPDAITRPLEALFDTYAVYIQHPVISKWLTIALFVSLFLNTYLFNVAKQPKQIVEQVNQDKKITNAIESTNNTHIEVTEKQKPTIQSPGPVVSSAVVMSPNHKRSHNHHHSHSHSHNHHSNHHQSDIVRPIDECVALVRTPEMLNDEEVISLVENGKMASYALEKVLGDLQRAVGIRRALISRASITKTLEASALPLENYHYDKVMGACCENVIGYMPIPVGVAGPMNIDGDLIHIPMATTEGCLVASTARGCKAINAGGGASTIVIADGMTRGPCVEFPTILRAAACKLWIENEGNDIVTNAFNSTSRFARLRKLKIALAGKLVFIRFSTTTGDAMGMNMISKGCEKALSIITEHFPDMQIISLSGNYCTDKKPAAINWIEGRGKSVVTEAVIPGAIVEKVLKTTVAALVELNISKNLIGSAMAGSVGGFNAHAANILTAIYLATGQDPAQNVESSNCITLMKAVNDTKDLHISCTMPSIEVGTIGGGTILPPQQSMLDMLGVRGPHPTEPGKNAQRLARIICAAVMAGELSLCAALAAGHLVKAHMAHNRGTQAPTITSGPAPSTGTEPGTCIKS

SEQ ID NO: 268 - protein, 888 aa, HUMAN [sequence omitted]

SEQ ID NO: 269 - protein, 888 aa, Human [sequence omitted]

SEQ ID NO: 270 - protein, 424 aa, Streptococcus pneumoniae; identical to SEQ ID NO: 171

SEQ ID NO: 271 - protein, 425 aa, Streptococcus pyogenes; identical to SEQ ID NO: 172

SEQ ID NO: 272 - protein, 425 aa, Staphylococcus epidermidis; identical to SEQ ID NO: 173

SEQ ID NO: 273 - protein, 425 aa, Staphylococcus haemolyticus; identical to SEQ ID NO: 174

SEQ ID NO: 274 - protein, 425 aa, Staphylococcus aureus; identical to SEQ ID NO: 175

SEQ ID NO: 275 - protein, 866 aa, Ips paraconfusus; identical to SEQ ID NO: 176

SEQ ID NO: 276 - protein, 353 aa, Kitasatospora griseola; identical to SEQ ID NO: 177

SEQ ID NO: 277 - protein, 434 aa, Leishmania major; identical to SEQ ID NO: 178

SEQ ID NO: 278 - protein, 247 aa, Anthonomus grandis; identical to SEQ ID NO: 180
  MISC_FEATURE (1)..(247): X equals unknown

SEQ ID NO: 279 - protein, 846 aa, Dendroctonus jeffreyi; identical to SEQ ID NO: 181

SEQ ID NO: 280 - protein, 846 aa, Dendroctonus jeffreyi; identical to SEQ ID NO: 181

SEQ ID NO: 281 - protein, 976 aa, Gibberella fujikuroi; identical to SEQ ID NO: 207

SEQ ID NO: 282 - protein, 353 aa, Streptomyces sp.; identical to SEQ ID NO: 182

SEQ ID NO: 283 - protein, 353 aa, Kitasatospora griseola; identical to SEQ ID NO: 177

SEQ ID NO: 284 - protein, 480 aa, Mus musculus
EFRAQQRFSTIPPAPLAKTDTWPKDVGILALEVYFPAQYVDQTDLEKFNNVEAGKYTVGLGQTRMGFCSVQEDINSLCLTVVQRLMERTKLPWDAVGRLEVGTETIIDKSKAVKTVLMELFQDSGNTDIEGIDTTNACYGGTASLFNAANWMESSYWDGRYALVVCGDIAVYPSGNARPTGGAGAVAMLIGPKAPLVLEQGLRGTHMENAYDFYKPNLASEYPLVDGKLSIQCYLRALDRCYAAYRKKIQNQWKQAGNNQPFTLDDVQYMIFHTPFCKMVQKSLARLMFNDFLSSSSDKQNNLYKGLEAFRGLKLEETYTNKDVDKALLKASLDMFNQKTKASLYLSTNNGNMYTSSLYGCLASLLSHHSAQELAGSRIGAFSYGSGLAASFFSFRVSKDASPGSPLEKLVSSVSDLPKRLDSRRRMSPEEFTEIMNQREQFYHKVNFSPPGDTSNLFPGTWYLERVDEMHRRKYARCPV

SEQ ID NO: 285 - protein, 508 aa, Sus scrofa
MQRLLTPVRQVLRVKRAMQEASFMPPLLPPAAHQRFSTVPAVPVAKADTWPKDVGILALEVYFPAQYVDQTDLEKFDNVEAGRYTVGLGQTHMGFCSVQEDINSLCLTVVQRLMERTQLPWDSVGWLEVGTETIIDKSKSVKTVLMELFQDSGNTDIEGIDTTNACYGGTASLFNAANWVESSAWDGRYAVVVCGDIAVYPRGNSRPTGGAGAVAMLVGPEAPLALERGLRGTHMENAYDFYKPNATSEYPLVDGKLSIQCYLRALDRCYTLYRQKIEKQWKQAGIERHFTLDDLQFMIFHTPFCKLVQKSLARLMFSDFLLADSDTQSSLYKGLEAFRGQKLEDTYANKDIEKAFQKASLDLFNKKTKPSLYLSLHNGNMYTSSLYGCLASLLSQCSAQDLAGSRIGAFSYGSGLAASFYSLRVSQDASPGSPLEKLVSSVSDLPERLASRKRVSPEEFTEIMNQREQYYHKVNFTPPGDPNSLFPGTWYLERVDELYRRKYARHLV

SEQ ID NO: 286 - protein, 409 aa, Sulfolobus solfataricus
MKIDEVVEKLVKGEISFHEVDNLLEANAAMVARRLALEKIVGVGLPSIGSTVIDYSEIKNKNAENVIGAIQIPLGIVGPIRVNGDYAKGDFYVPMATTEGALIASVNRGIKAVTLSGGVRAKVLKDEMTRAPVFKFDSIEQIPNFLKFIEENLEKIRNIANSTSHHGKLKSITPFVLGNNVWLRFSFETGDAMGMNMVTIAVEKVCEFIEENFPSADCLAVSGNMCSDKKQTNVNSLFGRGKTVVAEALIKKDVIRNILHSNAQLIHDINLRKNWLGTARAGSLSQFNAHFANIVTAIFIATGQDVAQIVESSSGYTWTEVRGEDLYISVTLPSLEVGTVGGGTRLPTQKEALSIMGVYGSGNPPGSNAKKLAEIIASTVLSGELNLLAALSNKELGKAHAKLGRAMKV

SEQ ID NO: 287 - protein, 1053 aa, Schizosaccharomyces pombe
MIYKLAARYPIQVIAIVGILVSMAYFSFLEALTQEDFPVLIRALKRFGILDGFPNTRLPNEMILKLSSVQGEDASVWEQIPAAELGGEGFVDFDITQWYYPANAKVDVAQLVEPYRNDCIFHDASGACHFFFKEVGNWTVSSIALPSNLANPPIDYFLDSSSTVIQRILPAIREHGISWSWLLQLIARTWMNTLKIASQASKTELLIVGTAYACMLISIVSLYLKMRRLGSKFWLFFSVLLSTLFSVQFAMTLVRASGVRISLVSLIESLPFLINVVALDKAAELTRQVITRCSVSDSHSPMHEDIAKACRNAAPPILRHFSFGIVVLAIFSYCNFGIKQFFLFAAVMIYDLLLLFSFFVAILTLKLEMRRYNAKDDVRKVLIEEGLSESTARHVADGNDSSATTSAGSRYFKVRYGTKIILFIFIAFNLFELCSIPFKHYAATSAAAARLIPLVRSQYPDFKSQRLLDDGVFDDVLSAISSMSNIESPSVRLLPAVFYGAELSSTSFLSTIHSFINNWSHYISASFLSKWIVCALSLSIAVNVFLLNAARLNSIKEEPEKKVVEKVVEVVKYIPSSNSSSIDDIQKDEIAQESVVRSLEECITLYNNGQISTLNDEEVVQLTLAKKIPLYALERVLKDVTRAVVIRRTVVSRSSRTKTLESSNCPVYHYDYSRVLNACCENVIGYMPLPLGVAGPLIIDGKPFYIPMATTEGALVASTMRGCKAINAGGGAVTVLTRDQMSRGPCVAFPNLTRAGRAKIWLDSPEGQEVMKKAFNSTSRFARLQHIKTALAGTRLFIRFCTSTGDAMGMNMISKGVEHALVVMSNDAGFDDMQVISVSGNYCTDKKPAAINWIDGRGKSVIAEAIIPGDAVKSVLKTTVEDLVKLNVDKNLIGSAMAGSVGGFNAHAANIVTAVYLATGQDPAQNVESSNCITLMDNVDGNLQLSVSMPSIEVGTIGGGTVLEPQGAMLDLLGVRGAHMTSPGDNSRQLARVVAAAVMAGELSLCSALASGHLVKSHIGLNRSALNTPAMDSSAKKPATDALKSVNSRVPGR

SEQ ID NO: 288 - protein, 888 aa, Oryctolagus cuniculus
MLSRLFRMHGLFVASHPWEVIVGTVTLTICMMSMNMFTGNDKICGWNYECPKFEEDVLSSDIIILTITRCIAILYIYFQFQNLRQLGSKYILGIAGLFTIFSSFVFSTVVIHFLDKELTGLNEALPFFLLLIDLSRASALAKFALSSNSQDEVRENIARGMAILGPTFTLDALVECLVIGVGTMSGVRQLEIMCCFGCMSVLANYFVFMTFFPACVSLVLELSRESREGRPIWQLSHFARVLEEEENKPNPVTQRVKMIMSLGLVLVHAHSRWIADPSPQNSTADNSKVSLGLDENVSKRIEPSVSLWQFYLSKMISMDIEQVITLSLALLLAVKYIFFEQAETESTLSLKNPITSPVVTQKKVPDSCCRREPVVVRNNQKFCSVEEEAGMSQDRKVEVIKPLVAETDSPHRAAFVVGGSSFPDTSLVLETKEPEIELPKEPRPNEECLQILGNAEKGAKFLSDAEIIQLVNAKHIPAYKLETLMETHERGVSIRRQLLSKKLPEPSSLQYLPYRDYNYSLVLGACCENVIGYMPIPVGVVGPLCLDGKEFQVPMATTEGCLVASTNRGCRAICLGGGASSRVLADGMTRGPVVRLPRACDSAEVKAWLETPEGFAVIKEAFDSTSRFARLQKLHISMAGRNLYIRFQSRTGDAMGMNMISKGTEKALSKLHEYFPEMQILAVSGNYCTDKKPAAVNWIEGRGKTVVCEAVIPAKVVREVLKTTTEAMIDVNINKNLVGSAMAGSIGGYNAHAANYVTAIYIACGQDAAQNVGSSNCITLMEASGPPNEDLYISCTMPSIEIGTVGGGTNLLPQQACLQMLGVQGACKDSPGENARQLARIVCGTVMAGELSLMAALAAGHLVKSHMIHNRSKINLQDLEGACTKKAA

SEQ ID NO: 289 - protein, 887 aa, Rattus norvegicus
MLSRLFRMHGLFVASHPWEVIVGTVTLTICMMSMNMFTGNNKICGWNYECPKFEEDVLSSDIIILTITRCIAILYIYFQFQNLRQLGSKYILGIAGLFTIFSSFVFSTVVIHFLDKELTGLNEALPFFLLLIDLSRASALAKFALSSNSQDEVRENIARGMAILGPTFTLDALVECLVIGVGTMSGVRQLEIMCCFGCMSVLANYFVFMTFFPACVSLVLELSRESREGRPIWQLSHFARVLEEEENKPNPVTQRVKMIMSLGLVLVHAHSRWIADPSPQNSTAEQSKVSLGLAEDVSKRIEPSVSLWQFYLSKMISMDIEQVITLSLALLLAVKYIFFEQAETESTLSLKNPITSPVVTPKKAQDNCCRREPLLVRRNQKLSSVEEDPGVNQDRKVEVIKPLVAEAETSGRATFVLGASAASPPLALGAQEPGIELPSEPRPNEECLQILESAEKGAKFLSDAEIIQLVNAKHIPAYKLETLMETHERGVSIRRQLLSAKLAEPSSLQYLPYRDYNYSLVMGACCENVIGYMPIPVGVAGPLCLDGKEYQVPMATTEGCLVASTNRGCRAISLGGGASSRVLADGMSRGPVVRLPRACDSAEVKSWLETPEGFAVVKEAFDSTSRFARLQKLHVTLAGRNLYIRLQSKTGDAMGMNMISKGTEKALLKLQEGVPELQILAVSGNYCTDKKPAAINWIEGRGKTVVCEAVIPAKVVREVLKTTTEAMVDVNINKNLVGSAMAGSIGGYNLHAANIVTAIYIACGQDAAQNVGSSNCITLMEASGPTNEDLYISCTMPSIEIGTVGGGTNLLPQQACLQMLGVQGACKDNPGENARQLARIVCGTVMAGELSLMAALAAGHLVRSHMVHNRSKINLQDLQGTCTKKAA

SEQ ID NO: 290 - protein, 491 aa, Saccharomyces cerevisiae
MKLSTKLCWCGIKGRLRPQKQQQLHNTNLQMTELKKQKTAEQKTRPQNVGIKGIQIYIPTQCVNQSELEKFDGVSQGKYTIGLGQTNMSFVNDREDIYSMSLTVLSKLIKSYNIDTNKIGRLEVGTETLIDKSKSVKSVLMQLFGENTDVEGIDTLNACYGGTNALFNSLNWIESNAWDGRDAIVVCGDIAIYDKGAARPTGGAGTVAMWIGPDAPIVFDSVRASYMEHAYDFYKPDFTSEYPYVDGHFSLTCYVKALDQVYKSYSKKAISKGLVSDPAGSDALNVLKYFDYNVFHVPTCKLVTKSYGRLLYNDFRANPQLFPEVDAELATRDYDESLTDKNIEKTFVNVAKPFHKERVAQSLIVPTNTGNMYTASVYAAFASLLNYVGSDDLQGKRVGLFSYGSGLAASLYSCKIVGDVQHIIKELDITNKLAKRITETPKDYEAAIELRENAHLKKNFKPQGSIEHLQSGVYYLTNIDDKFRRSYDVKK

SEQ ID NO: 291 - protein, 447 aa, Schizosaccharomyces pombe
MSFDRKDIGIKGLVLYTPNQYVEQAALEAHDGVSTGKYTIGLGLTKMAFVDDREDIYSFGLTALSQLIKRYQIDISKIGRLEVGTETIIDKSKSVKSVLMQLFGDNHNVEGIDCVNACYGGVNALFNTIDWIESSAWDGRDGIVVAGDIALYAKGNARPTGGAGCVALLVGPNAPIVFEPGLRGTYMQHAYDFYKPDLTSEYPYVDGHFSLECYVKALDGAYANYNVRDVAKNGKSQGLGLDRFDYCIFHAPTCKQVQKAYARLLYTDSAAEPSNPELEGVRELLSTLDAKKSLTDKALEKGLMAITKERFNKRVSPSVYAPTNCGNMYTASIFSCLTALLSRVPADELKGKRVGAYSYGSGLAASFFSFVVKGDVSEIAKKTNLVNDLDNRHCLTPTQYEEAIELRHQAHLKKNFTPKGSIERLRSGTYYLTGIDDMFRRSYSVKP

SEQ ID NO: 292 - protein, 520 aa, HUMAN
MPGSLPLNAEACWPKDVGIVALEIYFPSQYVDQAELEKYDGVDAGKYTIGLGQAKMGFCTDREDINSLCMTVVQNLMERNNLSYDCIGRLEVGTETIIDKSKSVKTNLMQLFEESGNTDIEGIDTTNACYGGTAAVFNAVNWIESSSWDGRYALVVAGDIAVYATGNARPTGGVGAVALLIGPNAPLIFERGLRGTHMQHAYDFYKPDMLSEYPIVDGKLSIQCYLSALDRCYSVYCKKIHAQWQKEGNDKDFTLNDFGFMIFHSPYCKLVQKSLARMLLNDFLNDQNRDKNSIYSGLEAFGDVKLEDTYFDRDVEKAFMKASSELFSQKTKASLLVSNQNGNMYTSSVYGSLASVLAQYSPQQLAGKRIGVFSYGSGLAATLYSLKVTQDATPGSALDKITASLCDLKSRLDSRTGVAPDVFAENMKLREDTHHLVNYIPQGSIDSLFEGTWYLVRVDEKHRRTYARRPTPNDDTLDEGVGLVHSNIATEHIPSPAKKVPRLPATAAEPEAAVISNGEH

SEQ ID NO: 293 - protein, 163 aa, Dictyostelium discoideum
RHENDYATKVAPTTLLAKQLGNTYCGSTYSGLLSLLDEKSNDLVGKRVLTFSYGSGLAASAFSFKVEKPINHIVEKVDLKNRLAKRVRVEPEIFTEKLSLRETRHNLKNYVPSDETTNMFPGSFYLSSVDKAGIRKFDRTYSTSAVLGAFQRRQQISHQQSNL

SEQ ID NO: 294 - protein, 458 aa, Caenorhabditis elegans
QLSYTPVTDVGIGAIELYFPQNFVDQNDLEKFNNVSSGKYTIGLGQQQMGFCSDNEDIVSISLTVTRKLIETYKISTDSIGCLVVGTETMIDKSKSVKTALMDLFPGNSDIEGVDIKNACFGGAQALLHAIDWVTVNHPLDKKNAIVVVADIAIYEEGPARCTGGAGAIAFLICPDASIPIDRQFSACHMKNTWDFFKPITPIPSEYPVVDGSLSLSSYLEAVRMTYTYFISKVNRHTTGIDGLNSFDGVFLHSPFTKMVQKGLAVMNYTDSQLRHKQLNGNGVDHKLDENDRAGLAKMIELSAQVWKEKTDPYLVFNRRIGNMYTPSLFAQLLAYLAADDCVTGEKSILFFAYGSGLASAIFPGRVRQTSNLDKIRQVAIRAIKRLDDRIQFTPEEFTETLQKREVFLRSKEIPKSPSETSLFPNTYFLDNMDKLYRRSYTLHEEPNGVQNGNGIHH

SEQ ID NO: 295 - protein, 461 aa, Arabidopsis thaliana
MAKNVGILAMDIYFPPTCVQQEALEAHDGASKGKYTIGLGQDCLAFCTELEDVISMSFNAVTSLFEKYKIDPNQIGRLEVGSETVIDKSKSIKTFLMQLFEKCGNTDVEGVDSTNACYGGTAALLNCVNWVESNSWDGRYGLVICTDSAVYAEGPARPTGGAAAIAMLIGPDAPIVFESKLRASHMAHVYDFYKPNLASEYPVVDGKLSQTCYLMALDSCYKHLCNKFEKIEGKEFSINDADYIVFHSPYNKLVQKSFARLLYNDFLRNASSIDEAAKEKFTPYSSLTLDESYQSRDLEKVSQQISKPFYDAKVQPTTLIPKEVGNMYTASLYAAFASLIHNKHNDLAGKRVVMFSYGSGSTATMFSLRLNDNKPPFSISNIASVMDVGGKLKARHEYAPEKFVETMKLMEHRYGAKDFVTTKEGIIDLLAPGTYYLKEVDSLYRRFYGKKGEDGSVANGH

SEQ ID NO: 296 - protein, 508 aa, HUMAN
MQRLLTPVKRILQLTRAVQETSLTPARLLPVAHQRFSTASAVPLAKTDTWPKDVGILALEVYFPAQYVDQTDLEKYNNVEAGKYTVGLGQTRMGFCSVQEDINSLCLTVVQRLMERIQLPWDSVGRLEVGTETIIDKSKAVKTVLMELFQDSGNTDIEGIDTTNACYGGTASLFNAANWMESSSWDGRYAMVVCGDIAVYPSGNARPTGGAGAVAMLIGPKAPLALERGLRGTHMENVYDFYKPNLASEYPIVDGKLSIQCYLRALDRCYTSYRKKIQNQWKQAGSDRPFTLDDLQYMIFHTPFCKMVQKSLARLMFNDFLSASSDTQTSLYKGLEAFGGLKLEDTYTNKDLDKALLKASQDMFDKKTKASLYLSTHNGNMYTSSLYGCLASLLSHHSAQELAGSRIGAFSYGSGLAASFFSFRVSQDAAPGSPLDKLVSSTSDLPKRLASRKCVSPEEFTEIMNQREQFYHKVNFSPPGDTNSLFPGTWYLERVDEQHRRKYARRPV

SEQ ID NO: 297 - protein, 455 aa, Blattella germanica
MAHWPEDVGIIGIEMIFPSLYVDQAELETYDEVSPGKYTMGLGQDKMGVCTDREDINSLCLTAVDKLMERNNIDYNDIGWLEVGTETILDKVKSVKTVLMQLFEESGNTDVEGIDTINACYRGTAALFNALIWIESSSWDGRYAIVVAADIAIYAKECSPTGGAGALLMLIGANAPIVIDRGVRASHMKHAYDFYKPDLMSEYPVVDGKLSVQCYLSALDHCYPRFCSKTEKYLKRCGKENTKIDLDYFDAFVFHSPYCKLVQKSVARLVLNDFIQYPEKYQDLQQLRNLKFEDTYFDRDIEKIFMDKSKQLFEKKTKPSLMLANQVGNMYTTSLYGGLVSLLISEDIGELAGKCICMFSYGSGFAASMFSLHISTDSSPGSTLSRLVTNLTHIKPQVQQRVKLSPGEFENIMEIREQNHHKAPYTPVASPNTLFPGTWYLESIDSMHRRKYKRV

SEQ ID NO: 298 - protein, 453 aa, Blattella germanica
MWPSDVGIVALELIFPSQYVDQVDLEVYDNVSAGKYTVGLGQARMGFCTDREDINSLCLTVVSRLMERWSIPYSQIGRLEVGTETLLDKSKSVKTVLMQLFKDNTDIEGVDTVNACYGGTSALFNAISWVESSSWDGRYALVVAGDIAVYAKGSARPTGGAGAVAMLVGANAPLVFDRGVRSSHMQHAYDFYKPDLSSLYPTVDGKLSIQCYLSALDHCYQLYCSKIQKQLGEKFDIERLDAVLFHAPYCKLVQKSLARLVLNDFVRASEEERTTKYSSLEALKGVKLEDTYFDREVEKAVMTYSKNMFEEKTKPSLLLANQVGNMYTPSLYGGLVSLLVSKSAQELAGKRVALFSYGSGLASSMFSLRISSDASAKSSLQRLVSNLSHIKPQLDLRHKVSPEEFAQTMETREHNHHKAPYTPEGSIDVLFPGTWYLESVDSLYRRSYKQVPG

SEQ ID NO: 299 - protein, 593 aa, Camptotheca acuminata
MDVRRRSINSIHQIPSVGGTAPPMLKPKQPTKVDAVDLPDSPKASDALPLPLYITNGVFFTLFFTVVYYLLVRWREKIRNSTPLHVVTLSEIAAIFTFVASFIYLLGFFGIGLVQPFTSRSSHDDVWGVDDDEDVDEIVLKEDTRTVPCAAAPVDCPLPPIKPKVVDPVPISPPSSEEDEEIIKSVVEGTTPSYALESKLGDSHRAAAIRREALQRMTKKSLAGLPLDGFDYDSILGQCCEMPVGYVQIPVGIAGPLLLDGREYSVPMATTEGCLVASTNRGCKAIFACGGATSVLLRDAMTRAPVVRFGSAKRAADLKFFLENPLNFETLAAVFNSSSRFGKLQNIKCAIAGKNLYMRYSCSTGDAMGMNMISKGVQNVLDFLQDDFPDMDVIGISGNYCSDKKPAAVNWIEGRGKSVVCEAVIKEEVVKKVLKTNVASLVELNMLKNLTGSAMAGALGGFNAHASNIVSAVYLATGQDPAQNVESSHCITMMEAINDGKDLHVSVTMPSIEVGTVGGGTQLASQSACLNLLGVKGASKEAPGSNARLLATIVAGSVLAGELSLMSAIAAGQLVNSHMKYNRSNKDVTKASS

SEQ ID NO: 300 - protein, 602 aa, Lycopersicon esculentum
MDVRRRSEEPVYPSKVFAADEKPLKPHKKQQQQQEDKNTLLIDASDALPLPLYLTTNGLFFTMFFSVMYFLLSRWREKIRNSTPLHVVTLSELGAIVSLIASVIYLLGFFGIGFVQTFVSRGNNDSWDENDEEFLLKEDSRCGPATTLGCAVPAPPARQIAPMAPPQPSMSMVEKPAPLITSASSGEDEEIIKSVVQGKIPSYSLESKLGDCKRAASIRKEVMQRITGKSLEGLPLEGFNYESILGQCCEMPIGYVQIPVGIAGPLLLNGKEFSVPMATTEGCLVASTNRGCKAIYASGGATCILLRDGMTRAPCVRFGTAKRAAELKFFVEDPIKFESLANVFNQSSRFARLQRIQCAIAGKNLYMRLCCSTGDAMGMNMVSKGVQNVLDYLQNEYPDMDVIGISGNFCSDKKPAAVNWIEGRGKSVVCEAIITEEVVKKVLKTEVAALVELNMLKNLTGSAMAGALGGFNAHASNIVSAVFIATGQDPAQNIESSHCITMMEAVNDGKDLHISVTMPSIEVGTVGGGTQLASQSACLNLLGVKGANREAPGSNARLLATVVAGSVLAGELSLMSAISSGQLVNSHMKYNRSTKDVTKASS

SEQ ID NO: 301 - protein, 481 aa, Dictyostelium discoideum
KGKSVNVEDLKDQEIIALVDKGEIQPHNLETRLPNNFQRAVHIRRKLLARDLQKEHQRALHAQAVVAAAEKAATSGEDPSSIQPVVPPTSNLDFEGSLTNLPVDHFDYTKVLGACCENVIGYIPIPVGVAGPILLDGKLVSIPMATTEGCLVASTHRGAKAITKSGGAKTVLLQSGMTRAPVCRLPSSIRAGELKQWIENQENFYQVASAFNSTSRFARLKSIKVVIAGRLVYLRFKSSTGDAMGMNMVSKGVEKALEVITEYFPEMEVLSLSGNVCTDKKPSSINWLEGRGKSVVAEAVISGDIVRDVLKTTVEALVSLNIDKNLIGSAMAGSIGGFNAHASNIVTALYIATGQDPAQNVESSNCITLMESINGGKDLYISVTMPSIEVGTVGGGTHLPAQSACLDLLKIRGANLERPGANSEQLARVVAAAVLSGELSLMSALAAGHLVRSHLKHNRKTEAPAPQADTISMTHNLPHSD

SEQ ID NO: 302 - protein, 552 aa, Dictyostelium discoideum
MLFAPPNLETKELFWIIYILILIPKVFAKVMSVRELFPFFKWGFNIRRSNFLVPILSNNVIVTGEEAVQYEKPLPYIPQHNQQQQQKQQPSQDYIQQPQNDNNINSGKEQEQQQQQQQQQQQTPDITNQPTKTNKKIPIKELSNEEILIKLEKGEVLAYRLENELGDCSRAVEIRRMLLEKQLSKKIEPIPHEGFDFAKVQGQCCENVIGYVPIPVGTAGPIQLNGQLVTIPMATTEGCLVASTHRGCKAITESGGAKCTITSRGMTRAPVVRFSDIVKASEFVSWINDTDNYQALKAVFDSTSRFARLSAIKCTIAGRSVYIRFKCDTGDAMGMNMVSKGVEAVLEHLKIIFDDMTLLSISGNMCTDKKPSSINWTEGRGRSVVCEAMITGDVVQRVLKTNVQALVDLNIAKNLIGSAMAGSIGGFNAHASNIVTAIFLATGQDCAQNVESSNCITQMEACNDGQDLYITVTMPSIEVGTVGGGTSLPAQSACLDIIGVKGSSSSKPGANADQLAKTIASAVMAGELSLMSALSAGHLMKSHLQYNRAKTN

SEQ ID NO: 303 - protein, 224 aa, Mus musculus; identical to SEQ ID NO: 216

SEQ ID NO: 304 - protein, 883 aa, Xenopus laevis
MLSRLFRMHGQFVASHPWEVIVGTVTLTICMMSMNMFTGNDKICGWNYACPKFEEDVLSSDIIILTITRCIAILYIYFQFQNLRQLGSKYILGIAGLFTIFSSFVFSTVVIHFLDKELTGLNEALPFFLLLIDLSKASALAKFALSSNSQDEVRDNIARGMAILGPTFTLEALVECLVIGVGTMSGVRQLEIMCCFGCMSVLANYFAFMTFFPACVSLVLELSRESREGRPIWQLSQFASVLEEEEDNKPNPVTQRVKMIMSLGLVLVHAHSRWISEPSSQNSTSISDHEVTTMLDDMMPKRVEPSMPLWQFYLSRMVTMDVEQIITLGLALLLAVKYIFFEQTETESTFSMKNPIISPVAVQKKQIESCCRREPEQEKTVHVSTTEEASSKEETEAVIKPLPLETSPKAKFIVGDSSPLELSPEDKNTMFDLPEEPRPLDECVRILKNPDKGAQYLTDAEVISLVNAKHIPAYKLETMMESPREGVAIRRQMLSDKLPQRSALQSLPYKNYNYSLVMGACCENVIGYMPIPVGVAGPLLLNNKEYQVPMATTEGCLVASTNRGCRAIMLGGGAKSRVLADGMTRGPVVRLPTACDAAEVKAWLDSAEGFKVIKDAFDSTSRFARLGRLQNCVAGRNLYIRFQSKTGDAMGMNMISKVTEQALARLQEEFPDLHVLAVSGNYCTDKKPAAINWIEGRGKSVVCEAIIPAKVVREVLKSSTEALVEVNINKNFIGSAMAGSIGGYNAHAANIVTAIYIACGQDAAQNVGSSNCITIMEATGPTYEDLYISCTMPSIEIGTVGGGTNLAPQQACLQMLGVQGASTETPGKNACQLAQIVCSTVMAGELSLMAALAAGHLVKSHMVHNRSKINLQDLPGTCTKKAA

SEQ ID NO: 305 - protein, 948 aa, Schistosoma mansoni; identical to SEQ ID NO: 221

SEQ ID NO: 306 - protein, 887 aa, Mesocricetus auratus; identical to SEQ ID NO: 217

SEQ ID NO: 307 - protein, 916 aa, Drosophila melanogaster
MIGPLFRATQFCASHPWEVIVALLTITACMLNGGQEQYPGCEQRIGHSTASAAAAGSGSGAGSGASGTIPPSSMGGSATSSRHRPCHGWSQSCDGLEAEYNAADVILMTIVRCTAVLYCYYQFCSLHRLGSKYVLGIAGLFTVFSSFIFTTAIIKFLGSDISELKDALFFLLLVIDLSNSGRLRSGAMGSNQAEVTQNIARGLELLGPAISLDTIVVVLLVGVGTLSGVQRLEVLCMFAVLSVLVNYVVFMTFYPACLSLIFDLSRSGVDMSVVREKAKGSLPLKSLTEEEQKANPVLQRVKLIMTTGLMAVHIYSREVSPAATTMVDKTLTPTLSLNVSNNRTESGEIADIIIKWLTMSADHIVISIVLIALVVKFICFDNRDPLPDQLRQSGPVAIEAKASQTTPIDEEHVEQEKDTENSAAVRTLLFTIEDQSSANASTQTDLLPLRHRLVGPIKPPRPVQECLDILNSTEEGSGPAALSDEEIVSIVHAGGTHCPLHKIESVLDDPERGVRIRRQIIGSRAKMPVGRLDVLPYEHFDYRKVLNACCENVLGYVPIPVGYAGPLLLDGETYYVPMATTEGALVASTNRGCKALSVRGVRSVVEDVGMTRAPCVRFPSVARAAEAKSWIENDENYRVVKTEFDSTSRFGRLKDCHIAMDGPQLYIRFVAITGDRMGMNMVSKALRWPFAEFTLHFPDMQIISLSGNFCCDKKPAAINWIKGRGKRVVTECTISAATLRSVLKTDAKTLVECNKLKNMGGSAMAGSIGGNNAHAANMVTAVFLATGQDPAQNVTSSNCSTAMECWAENSEDLYMTCTMPSLEVGTVGGGTGLPGQSACLEMLGVRGAHATRPGDNAKKLAQIVCATVMAGELSLMAALVNSDLVKSHMRHNRSSIAVNSANNPLNVTVSSCSTIS

SEQ ID NO: 308 - protein, 887 aa, Cricetulus griseus; identical to SEQ ID NO: 170

SEQ ID NO: 309 - protein, 1045 aa, Saccharomyces cerevisiae; identical to SEQ ID NO: 199

SEQ ID NO: 310 - protein, 210 aa, Hevea brasiliensis
LESDFADMDVIGISGNFCSDKKPAAVNWIEGRGKSVVCEAIIKEEVVKKVLKTDVALLVELNMLKNLAGSAVAGALGGFNAHAGNIVSAIFIATGQDPAQNVESSHCITMMEAVNDGKDLHISVTLPSIEVGTVGGGTQLASQSACLNLLGVMGACKESPGSYSRLLATIVAGSVLAGELSLMSAIAAGQLVKSHMKYNRSSKDVSKAAS

SEQ ID NO: 311 - protein, 1054 aa, Saccharomyces cerevisiae; identical to SEQ ID NO: 168

SEQ ID NO: 312 - protein, 575 aa, Hevea brasiliensis
MDTTGRLHHRKHATPVEDRSPTTPKASDALPLPLYLTNAVFFTLFFSVAYYLLHRWRDKIRNSTPLHIVTLSEIVAIVSLIASFIYLLGFFGIDFVQSFIARASHDVWDLEDTDPNYLIDEDHRLVTCPPANISTKTTIIAAPTKLPTSEPLIAPLVSEEDEMIVNSVVDGKIPSYSLESKLGDCKRAAAIRREALQRMTRRSLEGLPVEGFDYESILGQCCEMPVGYVQIPVGIAGPLLLNGREYSVPMATTEGCLVASTNRGCKAIYLSGGATSVLLKDGMTRAPVVRFASATRAAELKFFLEDPDNFDTLAVVFNKSSRFARLQGIKCSIAGKNLYIRFSCSTGDAMGMNMVSKGVQNVLEFLQSDFSDMDVIGISGNFCSDKKPAAVNWIEGRGKSVVCEAIIKEEVVKKVLKTNVASLVELNMLKNLAGSAVAGALGGFNAHAGNIVSAIFIATGQDPAQNVESSHCITMMEAVNDGKDLHISVTMPSIEVGTVGGGTQLASQSACLNLLGVKGANKESPGSNSRLLAAIVAGSVLAGELSLMSAIAAGQLVKSHMKYNRSSKDMSKAAS

SEQ ID NO: 313 - protein, 520 aa, Rattus norvegicus
MPGSLPLNAEACWPKDVGIVALEIYFPSQYVDQAELEKYDGVDAGKYTIGLGQARMGFCTDREDINSLCLTVVQKLMERNSLSYDCIGRLEVGTETIIDKSKSVKSNLMQLFEESGNTDIEGIDTTNACYGGTAAVFNAVNWIESSSWDGRYALVVAGDIAIYASGNARPTGGVGAVALLIGPNAPVIFDRGLRGTHMQHAYDFYKPDMLSEYPVVDGKLSIQCYLSALDRCYSVYRKKIRAQWQKEGKDKDFTLNDFGFMIFHSPYCKLVQKSLARMFLNDFLNDQNRDKNSIYSGLEAFGDVKLEDTYFDRDVEKAFMKASAELFNQKTKASLLVSNQNGNMYTSSVYGSLASVLAQYSPQQLAGKRIGVFSYGSGLAATLYSLKVTQDATPGSALDKITASLCDLKSRLDSRTCVAPDVFAENMKLREDTHHLANYIPQCSIDSLFEGTWYLVRVDEKHRRTYARRPSTNDHSLDEGVGLVHSNTATEHIPSPAKKVPRLPATSGEPESAVISNGEH

SEQ ID NO: 314 - protein, 520 aa, Cricetulus griseus
MPGSLPLNAEACWPKDVGIVALEIYFPSQYVDQAELEKYDGVDAGKYTIGLGQARMGFCTDREDINSLCLTVVQNLMERNSLSYDCIGRLEVGTETIIDKSKSVKSNLMQLFEESGNTDIEGIDTTNACYGGTAAVFNAVNWIESSSWDGRYALVVAGDIAIYATGNARPTGGVGAVALLIGPNAPLIFDRGLRGTHMQHAYDFYKPDMLSEYPIVDGKLSIQCYLSALDRCYSVYRKKIRAQWQKEGNDNDFTLNDFGFMISHSPYCKLVQKSLARMFLNDFLNDQNRDKNSIYSGLEAFGDVKLEDTYFDRDVEKAFMKASSELFNQKTKASLLVSNQNGNMYTSSVYGSLASVLAQYSPQQLAGKRIGVFSYGSGLAATLYSLKVTQDATPGSALDKVTASLCDLKSRLDSRTCVAPDVFAENMKLREDTHHLANYIPQCSIDSLFEGTWYLVRVDEKHRRTYARRPSTNDHNLGDGVGLVHSNTATEHIPSPAKKVPRLPATAAESESAVISNGEH

SEQ ID NO: 315 - protein, 522 aa, Gallus gallus
MPGSLPVNTESCWPKDVGIVALEIYFPSQYVDQTELEKYDGVDAGKYTIGLGQSKMGFCSDREDINSLCLTVVQKLMERNSLSYDCIGRLEVGTETIIDKSKSVKTVLMQLFEESGNTDVEGIDTTNACYGGTAALFNAINWIESSSWDGRYALVVAGDIAVYATGNARPTGGAGAVAMLVGSNAPLIFERGLRGTHMQHAYDFYKPDMVSEYPVVDGKLSIQCYLSALDRCYSVYRNKIHAQWQKEGTDRGFTLNDFGFMIFHSPYCKLVQKSVARLLLNDFLSDQNAETANGVFSGLEAFRDVKLEDTYFDRDVEKAFMKASAELFNQKTKASLLVSNQNGNMYTPSVYGCLASLLAQYSPEHLAGQRISEFSYGSGFAATLYSIRVTQDATPGSALDKITASLSDLKARLDSRKCIAPDVFAENMKIRQETHHLANYIPQCSVEDLFEGTWYLVRVDEKHRRTYARRPVMGDGPLEAGVEVVHPGIVHEHIPSPAKKVPRIPATTESEGVTVAISNGVH

SEQ ID NO: 316 - protein, 508 aa, Rattus norvegicus
MQRLLAPARRVLQVKRVMQESSLSPAHLLPAAQQRFSTIPPAPLAKTDTWPKDVGILALEVYFPAQYVDQTDLEKFNNVEAGKYTVGLGQTRMGFCSVQEDINSLCLTVVQRLMERTKLPWDAVGRLEVGTETIIDKSKAVKTVLMELFQDSGNTDIEGIDTTNACYGGTASLFNAANWMESSYWDGRYALVVCGDIAVYPSGNPRPTGGAGAVAMLIGPKAPLVLEQGLRGTHMENAYDFYKPNLASEYPLVDGKLSIQCYLRALDRCYAAYRRKIQNQWKQAGNNQPFTLDDVQYMIFHTPFCKMVQKSLARLMFNDFLSSSSDKQNNLYKGLEAFKGLKLEETYTNKDVDKALLKASLDMFNKKTKASLYLSTNNGNMYTSSLYGCLASLLSHHSAQELAGSRIGAFSYGSGLAASFFSFRVSKDASPGSPLEKLVSSVSDLPKRLDSRRRMSPEEFTEIMNQREQFYHKVNFSPPGDTSNLFPGTWYLERVDEMHRRKYARRPV

SEQ ID NO: 317 - protein, 567 aa, Artemisia annua; identical to SEQ ID NO: 184

SEQ ID NO: 318 - protein, 428 aa, Pseudomonas mevalonii; identical to SEQ ID NO: 223

SEQ ID NO: 319 - protein, 428 aa, Pseudomonas mevalonii; identical to SEQ ID NO: 223

SEQ ID NO: 320 - protein, 428 aa, Pseudomonas mevalonii; identical to SEQ ID NO: 223

SEQ ID NO: 321 - protein, 428 aa, Pseudomonas mevalonii; identical to SEQ ID NO: 223

SEQ ID NO: 322 - protein, 560 aa, Oryza sativa; identical to SEQ ID NO: 185

SEQ ID NO: 323 - protein, 587 aa, Cucumis melo; identical to SEQ ID NO: 186

SEQ ID NO: 324 - protein, 121 aa, Glycine max; identical to SEQ ID NO: 187

SEQ ID NO: 325 - protein, 236 aa, Schistosoma mansoni; identical to SEQ ID NO: 188

SEQ ID NO: 326 - protein, 18 aa, Solanum tuberosum
MDVRRRPVKPLYPSEHIS

SEQ ID NO: 327 - protein, 82 aa, Solanum tuberosum; identical to SEQ ID NO: 191

SEQ ID NO: 328 - protein, 82 aa, Solanum tuberosum; identical to SEQ ID NO: 192

SEQ ID NO: 329 - protein, 82 aa, Solanum tuberosum; identical to SEQ ID NO: 193

SEQ ID NO: 330 - protein, 82 aa, Solanum tuberosum; identical to SEQ ID NO: 192

SEQ ID NO: 331 - protein, 82 aa, Solanum tuberosum; identical to SEQ ID NO: 195

SEQ ID NO: 332 - protein, 59 aa, Solanum tuberosum; identical to SEQ ID NO: 190

SEQ ID NO: 333 - protein, 934 aa, Pichia jadinii; identical to SEQ ID NO: 196

SEQ ID NO: 334 - protein, 628 aa, Gossypium hirsutum; identical to SEQ ID NO: 197

SEQ ID NO: 335 - protein, 585 aa, Gossypium hirsutum; identical to SEQ ID NO: 198

SEQ ID NO: 336 - protein, 1045 aa, Saccharomyces cerevisiae; identical to SEQ ID NO: 199

SEQ ID NO: 337 - protein, 574 aa, Solanum tuberosum; identical to SEQ ID NO: 201

SEQ ID NO: 338 - protein, 595 aa, Solanum tuberosum; identical to SEQ ID NO: 202

SEQ ID NO: 339 - protein, 1053 aa, Schizosaccharomyces pombe; identical to SEQ ID NO: 203

SEQ ID NO: 340 - protein, 856 aa, Blattella germanica; identical to SEQ ID NO: 204

SEQ ID NO: 341 - protein, 59 aa, Solanum tuberosum; identical to SEQ ID NO: 190

SEQ ID NO: 342 - protein, 82 aa, Solanum tuberosum; identical to SEQ ID NO: 191

SEQ ID NO: 343 - protein, 82 aa, Solanum tuberosum; identical to SEQ ID NO: 192

SEQ ID NO: 344 - protein, 82 aa, Solanum tuberosum; identical to SEQ ID NO: 193

SEQ ID NO: 345 - protein, 82 aa, Solanum tuberosum; identical to SEQ ID NO: 192

SEQ ID NO: 346 - protein, 82 aa, Solanum tuberosum; identical to SEQ ID NO: 195

SEQ ID NO: 347 - protein, 277 aa, Sphaceloma manihoticola; identical to SEQ ID NO: 205

SEQ ID NO: 348 - protein, 976 aa, Gibberella fujikuroi; identical to SEQ ID NO: 207

SEQ ID NO: 349 - protein, 244 aa, Rattus norvegicus; identical to SEQ ID NO: 208
  MISC_FEATURE (1)..(244): x equals unknown

SEQ ID NO: 350 - protein, 102 aa, Artificial Sequence; identical to SEQ ID NO: 212
  NON_TER
  NON_TER (1)..(102): NON_TER

SEQ ID NO: 351 - protein, 115 aa, Artificial Sequence; identical to SEQ ID NO: 211
  NON_TER
  NON_TER (1)..(115): NON_TER

SEQ ID NO: 352 - protein, 462 aa, Artificial Sequence; identical to SEQ ID NO: 210
  NON_TER
  NON_TER (1)..(462): NON_TER

SEQ ID NO: 353 - protein, 123 aa, Artificial Sequence; identical to SEQ ID NO: 214
  NON_TER
  NON_TER (1)..(123): NON_TER

SEQ ID NO: 354 - protein, 562 aa, Arabidopsis thaliana; identical to SEQ ID NO: 215

SEQ ID NO: 355 - protein, 224 aa, Mus musculus; identical to SEQ ID NO: 216

SEQ ID NO: 356 - protein, 887 aa, Mesocricetus auratus; identical to SEQ ID NO: 217

SEQ ID NO: 357 - protein, 592 aa, Arabidopsis thaliana; identical to SEQ ID NO: 209

SEQ ID NO: 358 - protein, 948 aa, Schistosoma mansoni; identical to SEQ ID NO: 221

SEQ ID NO: 359 - protein, 887 aa, Cricetulus griseus; identical to SEQ ID NO: 170

SEQ ID NO: 360 - protein, 44 aa, Pseudomonas mevalonii; identical to SEQ ID NO: 222

SEQ ID NO: 361 - DNA, 2792 bp, Stevia rebaudiana
cccactcatcctttatcaaccaataccatcgttctgccaccggaagactgatacgcgacggacctgacgacgcctttaatctctgttggaccacctaacaaaattccgaccatcagatctactccggtggacagtttcatttgcaatttagtaaatcagcaaactaaacatcaatgaatctttcactatgcatcgcgtcccctttgttaaccaaatcaaatcgacccgcggctctgtcagctattcatacagcatcaacttcacatggtggacaaactaatcccactaatctgatcattgatacaaccaaagaacggatccaaaaacagtttaaaaatgtagaaatttctgtttcttcatatgacacagcatgggtagccatggtcccttctccaaactcacccaaatcgccttgtttccctgagtgtctcaattggttaattaataatcagcttaatgatggttcatggggtcttgttaatcacactcataatcataatcacccgttgcttaaagattctctatcttcaacattagcatgtattgttgcattaaaaagatggaatgttggggaagatcaaataaataaaggtctaagttttattgagtcaaatcttgcttcagctactgaaaaaagtcaaccatctcccattggttttgacatcatatttcctggtttgcttgagtatgcgaaaaacttggacataaacctcctttcaaaacaaacagattttagtttgatgctacataagagggaattggagcaaaaaagatgccattcaaatgagatggatggatacttggcgtatatctctgaaggactcggtaatttatatgattggaatatggtgaagaaatatcagatgaaaaatggttctgttttcaactcaccatcagcaacagctgctgctttcattaatcatcaaaatcctggttgtcttaattatttaaattcacttttggacaagtttggtaatgcagtcccaacagtttatcctcatgatttatttatccgactttctatggttgacacaattgaaagattaggaatttcacaccatttcagagtggaaattaaaaatgttttagatgaaacatacagatgttgggtggaacgagatgagcaaatattcatggatgttgtaacatgtgctttagcctttcggttattaaggatcaatgggtatgaagtttccccagatccattggctgaaattactaatgaattagctttgaaagacgaatatgcagctcttgaaacatatcatgcgtcacatatattataccaagaggatttatcttctggaaaacaaatcttgaagtcagctgatttcctcaaagagataatatccactgattcaaacaggctttctaaattaattcacaaagaggtggaaaatgctcttaagttccctatcaataccggtttagaacgcataaacactagacgaaatatacagctttacaatgtagacaatacaagaattctgaaaactacatatcactcatcaaatattagtaacactgattacctaaggttggctgttgaagatttctacacctgccaatctatttatcgtgaagaattaaaaggtcttgaaaggtgggtggtagagaataagttggaccagctcaagtttgctaggcaaaagaccgcctactgttatttctctgttgctgcaacactttcgtctcccgaattatcagatgcgcgtatttcatgggccaaaaatggcatattaactacagtagttgatgacttttttgatatcggtggtacaatcgatgaattgaccaacctgattcaatgtgttgaaaaatggaatgtagatgtcgacaaggattgttgttcagagcatgttcggattttatttttagcattaaaagatgcaatctgttggattggagatgaagcttttaaatggcaagcgcgcgatgtaactagccatgttattcaaacttggttggaactaatgaatagtatgttgagagaagctatatggacaagagatgcttatgtgccaacattaaatgaatatatggaaaacgcttacgtgtcatttgcattaggcccgattgtcaagccggctatttactttgtggggcccaaattatcagaggagattgttgaaagctctgaatatcataatctatttaagctaatgagcacgcagggtcgacttctaaacgatatccatagcttcaagagggaatttaaggaaggcaaattaaacgcggtagcattgcatttgagtaacggagaaagtgggaaagtggaagaagaggttgtggaggagatgatgatgatgattaaaaacaagaggaaagaattaatgaaattaatttttgaagaaaatggtagcattgttcctagagcttgtaaagatgcattttggaacatgtgtcacgtgttgaattttttttacgcaaacgatgacgggtttactggaaacacgattcttgatactgtgaaggacatcatttacaacccgttggtgcttgtgaatgaaaatgaagaacaaaggtaattggcctttaaaagatgataataatatcatgctcttgacgggggtactgttgtagttgtataataaaggttgtagttgtataataaaggtaataggtaatcaatagaaagcttaagttattaagtttttccctcgtgtcacacacggtgaggttcttgttaaagcagtttattttatgtttagtacgacacttggtggttgttcgttgtttattctctaagaggctttcactttgttcttaaaaaaaaaaaaaaaaaaaaaaaa

SEQ ID NO: 362 - DNA, 3117 bp, Stevia rebaudiana
atttcttttgctctgattgaacacacgattatctgtatttatgaggattgtagcatattgtttgattttttatgattattttacacttattctctgtcatctccgagtctatttggtctgacaagcaatacaatatcctcttagattcactctacataggatttaggatgcattgttattatcctaaaatcatcttcattttgatccattgcactgcctgctccgtaagcttcttatgattcggataattccggtagagaataaagttcggagtatgcatcattgaagttaatattctggattgatgttcgttaggaattggtacagtagaaaattagctagtttgcttgatttgacctagaatatagcttcagaaatttgttaatctgtgagcaatgattcagatgttgataacttttggggcaacttcatgttaaaaaacttatatattaaaatgttttcaagttggtgttgcagtaaatcagcaaactaaacatcaatgaatctttcactatgcattgcgtcccctttgttaaccaaatcaagtcgacccacggctctgtcagctattcatacagcatcaacttcacatggtggacaaactaatcccactaatctgatcattgatacaaccaaagaacggatccaaaaactgtttaaaaatgtagaaatttctgtttcttcatatgacacagcatgggtagccatggtcccttctccaaactcacccaaatcgccttgtttccctgagtgtctcaattggttaattaataatcagcttaatgatggttcatggggtcttgttaatcacactcataatcataatcacccgttgcttaaagattctctatcttcaacattagcatgtattgttgcattaaaaagatggaatgttggggaagatcaaataaataaaggtctaagttttattgagtcaaatcttgcttcagcaactgacaaaagtcaaccatctcccattggttttgatatcatatttcctggtttgcttgagtatgcgaaaaacttggacataaacctcctttcaaaacaaacagattttagtttgatgctacataagagggaattggagcaaaaaagatgccattcaaatgagattgatggatacttggcgtatatctctgaaggactcggtaatttatatgattggaatatggtgaagaaatatcagatgaaaaatggttctgttttcaactcaccatcagcaacagcagctgctttcattaatcatcaaaatcccggttgtcttaattatttaaattcacttttggacaagtttggtaatgcagtcccaacagtttatcctcttgatttatatatccggctttctatggttgacacaattgaaagattaggaatttcacaccatttcagagtggaaattaaaaatgttttagatgaaacatacagatgttgggtggaacgagatgagcaaatattcatggatgttgtaacatgtgctttagcctttcggttattaaggatccacgggtataaagtctccccagatcaattggctgaaattactaatgaattagctttcaaagacgaatacgcagctcttgaaacatatcatgcatcacagatattataccaagaggatttatcttctggaaaacaaatcttgaagtcagctgatttcctcaaagggatattatccactgattcaaacaggctttctaaattaattcacaaagaggtggaaaatgctcttaagttccctatcaataccggtttagaacgcataaacactagacgaaatatacagctttacaatgtagacaatacaagaattctgaaaactacatatcactcatcaaatattagtaacacttattacctaaggttggctgttgaagatttctacacctgccaatctatttatcgtgaagaattaaaaggtcttgaaaggtgggtggtacagaataagttggaccagctcaagtttgctaggcaaaagaccgcctactgttatttctctgttgctgcaacactttcgtctcccgaattatcagatgcgcgtatttcatgggccaaaaatggcatattaactacagtagttgatgacttttttgatatcggtggtacaatcgatgaattgaccaacctgattcaatgtgttgaaaaatggaatgtagatgtcgacaaggattgttgttcagagcatgttcggattttatttttagcattaaaagatgcaatctgttggattggagatgaagcttttaaatggcaagcgcgcgatgtaactagccatgttattcaaacttggttggaactaatgaatagtatgttgagagaagctatatggacaagagatgcttatgtgccaacattaaatgaatatatggaaaacgcttacgtgtcatttgcattaggcccgattgtcaagccggctatttactttgtggggcccaaattatcagaggagattgttgaaagctctgaatatcataatctatttaagctaatgagcacgcagggtcgacttctaaacgatatccatagcttcaagagggaatttaaggaaggcaaattaaacgcggtagcattgcatttgagtaacggagaaagtgggaaagtggaagaagaggttgtggaggagatgatgatgatgattaaaaacaagaggaaagaattaatgaaattaatttttgaagaaaatggtagcattgttcctagagcttgtaaagatgcattttggaacatgtgtcacgtgttgaattttttttacgcaaacgatgacgggtttactggaaacacgattcttgatactgtgaaggacatcatttacaacccgttggtgcttgtgaatgaaaatgaagaacaaaggtaattggcctttaaaagatgataataatatcatgctcttgacgggggtactgttgtagttgtataataaaggttgtagttgtataataaaggtaataggtaatcaatagaaagcttaagttattaagtttttccctcgtgtcacacacggtgaggttcttgttaaagcagtttattttatgtttagtacgacacttggtggttgttcgttgtttattctctaagaggctttcactttgttcttaataagaagtttttattgtgttg

SEQ ID NO: 363 - DNA, 2700 bp, Taxus brevifolia
ttcccctgcctctctggagaaatggctcagctctcatttaatgcagcgctgaagatgaacgcattggggaacaaggcaatccacgatccaacgaattgcagagccaaatctgagcgccaaatgatgtgggtttgctccagatcagggcgaaccagagtaaaaatgtcgagaggaagtggtggtcctggtcctgtcgtaatgatgagcagcagcactggcactagcaaggtggtttccgagacttccagtaccattgtggatgatatccctcgactctccgccaattatcatggcgatctgtggcaccacaatgttatacaaactctggagacaccgtttcgtgagagttctacttaccaagaacgggcagatgagctggttgtgaaaattaaagatatgttcaatgcgctcggagacggagatatcagtccgtctgcatacgacactgcgtgggtggcgaggctggcgaccatttcctctgatggatctgagaagccacggtttcctcaggccctcaactgggttttcaacaaccagctccaggatggatcgtggggtatcgaatcgcactttagtttatgcgatcgattgcttaacacgaccaattctgttatcgccctctcggtttggaaaacagggcacagccaagtacaacaaggtgctgagtttattgcagagaatctaagattactcaatgaggaagatgagttgtccccggatttccaaataatctttcctgctctgctgcaaaaggcaaaagcgttggggatcaatcttccttacgatcttccatttatcaaatatttgtcgacaacacgggaagccaggcttacagatgtttctgcggcagcagacaatattccagccaacatgttgaatgcgttggaaggtctcgaggaagttattgactggaacaagattatgaggtttcaaagtaaagatggatctttcctgagctcccctgcctccactgcctgtgtactgatgaatacaggggacgaaaaatgtttcacttttctcaacaatctgctcgacaaattcggcggctgcgtgccctgtatgtattccatcgatctgctggaacgcctttcgctggttgataacattgagcatctcggaatcggtcgccatttcaaacaagaaatcaaaggagctcttgattatgtctacagacattggagtgaaaggggcatcggttggggcagagacagccttgttccagatctcaacaccacagccctcggcctgcgaactcttcgcatgcacggatacaatgtttcttcagacgttttgaataatttcaaagatgaaaacgggcggttcttctcctctgcgggccaaacccatgtcgaattgagaagcgtggtgaatcttttcagagcttccgaccttgcatttcctgacgaaagagctatggacgatgctagaaaatttgcagaaccatatcttagagaggcacttgcaacgaaaatctcaaccaatacaaaactattcaaagagattgagtacgtggtggagtacccttggcacatgagtatcccacgcttagaagccagaagttatattgattcatatgacgacaattatgtatggcagaggaagactctatatagaatgccatctttgagtaattcaaaatgtttagaattggcaaaattggacttcaatatcgtacaatctttgcatcaagaggagttgaagcttctaacaagatggtggaaggaatccggcatggcagatataaatttcactcgacaccgagtggcggaggtttatttttcatcagctacatttgaacccgaatattctgccactagaattgccttcacaaaaattggttgtttacaagtcctttttgatgatatggctgacatctttgcaacactagatgaattgaaaagtttcactgagggagtaaagagatgggatacatctttgctacatgagattccagagtgtatgcaaacttgctttaaagtttggttcaaattaatggaagaagtaaataatgatgtggttaaggtacaaggacgtgacatgctcgctcacataagaaaaccctgggagttgtacttcaattgttatgtacaagaaagggagtggcttgaagccgggtatataccaacttttgaagagtacttaaagacttatgctatatcagtaggccttggaccgtgtaccctacaaccaatactactaatgggtgagcttgtgaaagatgatgttgttgagaaagtgcactatccctcaaatatgtttgagcttgtatccttgagctggcgactaacaaacgacaccaaaacatatcaggctgaaaaggctcgaggacaacaagcctcaggcatagcatgctatatgaaggataatccaggagcaactgaggaagatgccattaagcacatatgtcgtgttgttgatcgggccttgaaagaagcaagctttgaatatttcaaaccatccaatgatatcccaatgggttgcaagtcctttatttttaaccttagattgtgtgtccaaatcttttacaagtttatagatgggtacggaatcgccaatgaggagattaaggactatataagaaaagtttatattgatccaattcaagtatgatatatcatgtaaaacctctttttcatgataaattgacttattattgtattggcaaaaaaaaaaaaaaaaaaaaaaaaaaaaaaaaaaaaa

SEQ ID NO: 364 - DNA, 3007 bp, Phaeosphaeria sp.
tattggtattatcacgagacatattcaaaaccattgcttggagcttgtcaaagcgactcactattcatcatgtttgccaaattcgatatgcttgaagaagaagcccgggcccttgttcgaaaagtaggtaacgcagttgatccgatttacggcttcagtaccacgagctgtcagatctacgacacagcctgggcggccatgatatctaaagaagagcatggagacaaagtgtggctctttcccgagagtttcaaatatctccttgaaaagcaaggcgaggacggtagctgggaaagacatcccaggtcgaagacggttggcgtcttgaacacagcggctgcgtgtcttgcactcttgcgtcatgtcaaaaaccctctacagctacaagatatcgctgctcaagatatcgaattgcgcatccagcgtgggctaagatcacttgaagaacaacttatcgcctgggacgacgtgttggacaccaatcacattggtgttgagatgattgtccccgcattattggactatttgcaggcagaagacgaaaacgtggactttgaattcgagagccacagcctactgatgcagatgtacaaggaaaaaatggcccgcttcagtcctgagtctctctaccgggcgcggccatcgtcagccctccacaatctggaggctctgattggcaagctggatttcgacaaggttggacatcacctgtacaatggttcaatgatggcatctccgtcctctacagcagcttttttgatgcatgcttccccatggagtcacgaggctgaagcatatttgcggcatgtattcgaagctggtacaggcaaaggttcgggcggatttccaggcacatatcctactacgtactttgagttgaactgggtgctgtctactcttatgaaaagcgggtttactctatctgatctggagtgtgatgagctttccagcatcgcaaacaccattgctgaagggttcgagtgtgatcatggtgtgatcggttttgctccacgtgcagtggatgttgacgacacggccaaagggctactgacgctgactttgcttggcatggatgaaggtgtcagtcctgcgccaatgattgccatgttcgaagccaaagatcatttcttgacgtttctgggggagagggacccaagtttcacgtcgaactgtcacgtgctgctttctctgttgcatcgaacggatctactgcaatacctgcctcagatacggaaaacgacgacgttcctgtgcgaagcatggtgggcgtgcgatgggcagatcaaagacaagtggcatctgagccatctgtacccaacaatgttgatggtgcaagcgtttgcggaaattttgctcaagagcgccgagggagagcctctccacgacgctttcgacgcggccacgctatcgcgagtctccatctgcgtgttccaggcgtgcttacgaacgctgctggcccagagccaggatggatcgtggcatggccaaccagaggcttcgtgctatgcggttctaacgctcgccgagtcgggtcggctcgtgttgctgcaggccctgcagccgcagattgcagctgccatggaaaaggccgcagacgtcatgcaggccggacgctggagctgcagcgaccatgactgtgactggacgtccaaaacggcatatcgcgtggaccttgttgctgcagcgtaccgcctagccgccatgaaggctagctccaacttaaccttcaccgtcgacgacaatgtgtcgaagcgtagcaacggtttccagcagctggtcggccggacagatctgttctctggggtaccggcatgggaattgcaggcgtcatttcttgagagcgctctatttgttcccctgctcagaaaccaccggctcgacgtatttgaccgagacgatatcaaggtcagcaaggatcattatctcgacatgattcccttcacttgggtcggctgcaataaccggtcacgcacatatgtttcgacatcgtttctatttgacatgatgatcatctccatgctgggataccagattgacgagttcttcgaagctgaggccgcccccgcgtttgcccagtgcatcggccaactccaccaggtggttgataaagtcgttgatgaagtgattgatgaagtcgttgataaagtcgttggtaaagtcgtcggtaaagtcgtcggtaaagtcgttgatgagcgagtcgactcaccaacgcacgaagccattgcaatttgcaacatcgaggcttcgctgcggcggttcgtcgaccatgtgctgcatcaccagcatgtacttcacgccagccagcaggagcaagacatcctgtggcgcgagctgcgggcttttttgcacgctcatgttgtccagatggccgacaactccaccttagcgccacccggtcgcaccttcttcgactgggttcgcactaccgctgcagatcacgtggcatgtgcctactcgtttgcatttgcatgctgcatcacctctgccaccatcggccagggtcagagcatgtttgccacggtcaacgaactatacctcgtgcaagccgctgcccgccatatgacaacaatgtgccgcatgtgtaacgacattggctctgtcgaccgcgatttcatcgaagctaacattaactcggtccatttcccagaattctcaaccttgagcttggttgccgacaagaaaaaggctcttgcacgcctggctgcgtatgagaagtcttgtctgacccatacactcgaccagttcgagaacgaggttcttcaatctcccagagtctcctcggctgcgtctggtgatttccgcacaagaaaggtggccgttgtacgcttttttgctgatgtcacggatttttacgaccagctatacatactccgcgacctctccagctctttgaaacacgtcggcacgtagagacatgcgcttagtaatgttccatcattgataggcctgtaatgatgtatctttagctcccctcttaacttgggtagacaacctggatttttactac

SEQ ID NO: 365 - DNA, 2861 bp, Abies grandis
agatggccatgccttcctcttcattgtcatcacagattcccactgctgctcatcatctaactgctaacgcacaatccattccgcatttctccacgacgctgaatgctggaagcagtgctagcaaacggagaagcttgtacctacgatggggtaaaggttcaaacaagatcattgcctgtgttggagaaggtggtgcaacctctgttccttatcagtctgctgaaaagaatgattcgctttcttcttctacattggtgaaacgagaatttcctccaggattttggaaggatgatcttatcgattctctaacgtcatctcacaaggttgcagcatcagacgagaagcgtatcgagacattaatatccgagattaagaatatgtttagatgtatgggctatggcgaaacgaatccctctgcatatgacactgcttgggtagcaaggattccagcagttgatggctctgacaaccctcactttcctgagacggttgaatggattcttcaaaatcagttgaaagatgggtcttggggtgaaggattctacttcttggcatatgacagaatactggctacacttgcatgtattattacccttaccctctggcgtactggggagacacaagtacagaaaggtattgaattcttcaggacacaagctggaaagatggaagatgaagctgatagtcataggccaagtggatttgaaatagtatttcctgcaatgctaaaggaagctaaaatcttaggcttggatctgccttacgatttgccattcctgaaacaaatcatcgaaaagcgggaggctaagcttaaaaggattcccactgatgttctctatgcccttccaacaacgttattgtattctttggaaggtttacaagaaatagtagactggcagaaaataatgaaacttcaatccaaggatggatcatttctcagctctccggcatctacagcggctgtattcatgcgtacagggaacaaaaagtgcttggatttcttgaactttgtcttgaagaaattcggaaaccatgtgccttgtcactatccgcttgatctatttgaacgtttgtgggcggttgatacagttgagcggctaggtatcgatcgtcatttcaaagaggagatcaaggaagcattggattatgtttacagccattgggacgaaagaggcattggatgggcgagagagaatcctgttcctgatattgatgatacagccatgggccttcgaatcttgagattacatggatacaatgtatcctcagatgttttaaaaacatttagagatgagaatggggagttcttttgcttcttgggtcaaacacagagaggagttacagacatgttaaacgtcaatcgttgttcacatgtttcatttccgggagaaacgatcatggaagaagcaaaactctgtaccgaaaggtatctgaggaatgctctggaaaatgtggatgcctttgacaaatgggcttttaaaaagaatattcggggagaggtagagtatgcactcaaatatccctggcataagagtatgccaaggttggaggctagaagctatattgaaaactatgggccagatgatgtgtggcttggaaaaactgtatatatgatgccatacatttcgaatgaaaagtatttagaactagcgaaactggacttcaataaggtgcagtctatacaccaaacagagcttcaagatcttcgaaggtggtggaaatcatccggtttcacggatctgaatttcactcgtgagcgtgtgacggaaatatatttctcaccggcatcctttatctttgagcccgagttttctaagtgcagagaggtttatacaaaaacttccaatttcactgttattttagatgatctttatgacgcccatggatctttagacgatcttaagttgttcacagaatcagtcaaaagatgggatctatcactagtggaccaaatgccacaacaaatgaaaatatgttttgtgggtttctacaatacttttaatgatatagcaaaagaaggacgtgagaggcaagggcgcgatgtgctaggctacattcaaaatgtttggaaagtccaacttgaagcttacacgaaagaagcagaatggtctgaagctaaatatgtgccatccttcaatgaatacatagagaatgcgagtgtgtcaatagcattgggaacagtcgttctcattagtgctcttttcactggggaggttcttacagatgaagtactctccaaaattgatcgcgaatctagatttcttcaactcatgggcttaacagggcgtttggtgaatgacaccaaaacttatcaggcagagagaggtcaaggtgaggtggcttctgccatacaatgttatatgaaggaccatcctaaaatctctgaagaagaagctctacaacatgtctatagtgtcatggaaaatgccctcgaagagttgaatagggagtttgtgaataacaaaataccggatatttacaaaagactggtttttgaaactgcaagaataatgcaactcttttatatgcaaggggatggtttgacactatcacatgatatggaaattaaagagcatgtcaaaaattgcctcttccaaccagttgcctagattaaattattcagttaaaggccctcatggtattgtgttaacattataataacagatgctcaaaagctttgagcggtatttgttaaggctatctttgtttgtttgtttgtttactgccaaccaaaaagcgttcctaaacctttgaagacatttccatccaagagatggagtctacattttatttatgagattgaattatttcaagagaatatactacatatatttaaaagtaaaaaaaaaaaaaaaaaaaaa

SEQ ID NO: 366 - DNA, 1994 bp, Ricinus communis
actcagcagccgcctctcctaccccaattagcacagaagatttggtggttcctctccttgtgaaacatggcattgccatcagctgctatgcaatccaaccctgaaaagcttaacttatttcacagattgtcaagcttacccaccactagcttggaatatggcaataatcgcttccctttcttttcctcatctgccaagtcacactttaaaaaaccaactcaagcatgtttatcctcaacaacccaccaagaagttcgtccattagcatactttcctcctactgtctggggcaatcgctttgcttccttgaccttcaatccatcggaatttgaatcgtatgatgaacgggtaattgtgctgaagaaaaaagttaaggacatattaatttcatctacaagtgattcagtggagaccgttattttaatcgacttattatgtcggcttggcgtatcatatcactttgaaaatgatattgaagagctactaagtaaaatcttcaactcccagcctgaccttgtcgatgaaaaagaatgtgatctctacactgcggcaattgtattccgagttttcagacagcatggttttaaaatgtcttcggatgtgtttagcaaattcaaggacagtgatggtaagttcaaggaatccctacggggtgatgctaagggtatgctcagcctttttgaagcttcccatctaagtgtgcatggagaagacattcttgaagaagcctttgctttcaccaaggattacttacagtcctctgcagttgagttattccctaatctcaaaaggcatataacgaacgccctagagcagcctttccacagtggcgtgccgaggctagaggccaggaaattcatcgatctatacgaagctgatattgaatgccggaatgaaactctgctcgagtttgcaaagttggattataatagagttcagttattgcaccaacaagagctgtgccagttctcaaagtggtggaaagacctgaatcttgcttcggatattccttatgcaagagacagaatggcagagattttcttttgggcagtcgcgatgtactttgagcctgactatgcacacacccgaatgattattgcgaaggttgtattgcttatatcactaatagatgatacaattgatgcgtatgcaacaatggaggaaactcatattcttgctgaagcagtcgcaaggtgggacatgagctgcctcgagaagctgccagattacatgaaagttatttataaactattgctaaacaccttctctgaattcgagaaagaattgacggcggaaggcaagtcctacagcgtcaaatacggaagggaagcgtttcaagaactagtgagaggttactacctggaggctgtatggcgcgacgagggtaaaataccatcgttcgatgactacttgtataatggatccatgaccaccggattgcctctcgtctcaacagcttctttcatgggagttcaagaaattacaggtctcaacgaattccaatggctggaaactaatcccaaattaagttatgcttccggtgcattcatccgacttgtcaacgacttaacttctcatgtgactgaacaacaaagaggacacgttgcatcttgcatcgactgctatatgaaccaacatggagtttccaaagacgaagcagtcaaaatacttcaaaaaatggctacagattgttggaaagaaattaatgaagaatgtatgaggcagagtcaagtgtcagtgggtcacctaatgagaatagttaatctggcacgtcttacggatgtgagttacaagtatggagacggttacactgattcccagcaattgaaacaatttgttaagggattgttcgttgatccaatttctatttgaactcaataattccttttttcattttgtacttcaataagttataaatgacccgtgcactagcggtggtgattattgtatttaaattgccttttaaattaatatatgaatcaagaattttatag

SEQ ID NO: 367 - DNA, 2638 bp, Cucumis sativus
atagctggaaatgttctcacaaagcatgcagcgaagactgaagctggcaacggccgttatacctctgtattcctcaatcaatgaatctttcccgacccaccaaccttggatgttttactgcctcctcctcagcttctctattccctggattggatgtgggcacaaaaactaaaactggagctttgcgctttgaagaaacaaaagaaagaataaaaaaattgttcaaaaatgttgaactttcaatttctgcatatgatactgcatgggtggcaatggtcccttctccaaactctcttaataaacctctttttcctgagtgcataaactgggtattagatcatcaaaaccctgatgggtcatggggcatactccatgaccatcagttggtgatgaaagccactctcttatccacattagcatgtgttcttactcttaagcgatgggatatcggtgatgatcatatgagcaaggcccttagttttatcaagtctaatatagcttcagctactgatgagaatcaacgttctcctgtgggatttgacataattttccctggtatgattgagtatgctaaagacttgaatttgaatctacccttggcatcaatgaatgtggatgctttggttcaaaagaaagagttggagcttagaagctgctgtagcaactctgaaggaggaaaagcctatttagcgtatgtttcagaaggaattggaaaattacaggactgggaaatggtcatgcgatatcaaaggaagaacggatcactgtttagttctccatccaccacggcagtggcttttatgcacagaaatgatgatggctgttttaattaccttcgctcagtcttacaaaagtttcatagttcagttcccgcaatatatcctcttgatatatatgctcgtttacacatggttgatagccttcaaaaactggggattgatggccatttcaaagatgagattagaagtgtattagatgaaacatacagctgttggatgcaaggggaggaaaacatattcctagatgcttcaacttgtgcaatggccttccggatgttacgtgttgaaggatatgatgtttcttcagatcaattgactcaattctcagaaggtctcttttcaaattgcctcggaggacatttaaaagactttagtgcctcactagagttatttaaggcctcccagattatcatttatccggatgagtttattctggaaaatataaactcttggactagtcgtttcctgaatcatggattatctagtggttcagttcattctgatagaactgagagactcgtgaaacaagaggcagttaatgctttcgagttcccctataattcaactctggaacgcttatcaaataagcgagcactggaaagttacagtggagacattgtgaggatttcaaaaacagcatatgcctgcttaaattttggtcatcaagatttcttggaacttgctgtagaagatttcaataccctgcaaggcatacatcgcaaggaactgaaagagcttgaaaaatgggtcatcgaaaacaaattggacaagttgaaatttgcgagacagaagttagcgtactgctatttttctgctgcagcgaccctaacctctccagaactttgtgatgcccgcttatcatgggcaaaaaatggggtactcacaaccgtggttgatgatttctttgatgttggaggatctgaagaggaattggtaaaccttatacaattggtggaaaagtgggatgccagtggggaaacgggttactgttccaaggaggttgagattatatttcttgcacttcatagcacaatttgtgaaataggaaaaaaagctttaccttggcaaggacgcagcgtgatgaggaatgttatcgatatttggttggctttgctcgagtcaatgaggaaggaagctgaatggttgaaaaataaggtagtgccatcattggatgagtacatggaaaatggctatgtatcatttgctttgggacctatagtccttccaacgctctactttgttggacctaagcttccagaggaaattgttggaaattgtgaatacaagaagctctttaagctgatgagcacttctggccgccttctgaatgatactcgaacttttgatagagagtccagcgaagggaaattaaatgccttgtctctatacatgattagtgccggtggtaagctcaccaaagaggaggccactgaagcaatgaaaggagatgttgataggacgagaagagaactgttgagattagttttgcaggagaacagtacaattccaagagcttgtaaggatttgttctggaaaatgagctgtgttgtgcatctattttacaggaaagatgatgggtttacatcccatgagttgatgaactctgcgaaagccttatttgaacaacccatggttctggatgaacttttgaacaaatgaaacaagttaatttgtaaacatggggatggagaagtccttatgaaacttcaataatgggaagtagatgtagacatcttctattcacaagctctttctatacttgtctgttttttattcccttatactccactacttatattccacttttgttacatttgagggaaaaaaaaaaaaaaaaaaaaaaaaaaaaaaaaaaaaaa

SEQ ID NO: 368 - DNA, 2594 bp, Lactuca sativa
cggattaacgcctgttttcaagggttcgctttcatcaacatctgtcattcttagtctcaggggatcaatttctcgacgaaacatcaatgaatatcgcacagatcacatcatccgccatgctggttccttcgtcacacataccacatcgctcatgggtggttaattgctgtatggtgcaatacaacccatcgggtcttcgtacagcttcttcacaagctggacaagttaatcctactgtcatgacccttgatgtgaccaaagaacgaatccgaaagctgttcaacaatgtggaagtttctgtttcttcatatgacacagcttgggtagccatggtcccttctccaaactctcccaaatccccttgtttccctgattgtctgaactggttactggataatcagcttgatgatggttcatggggtcttcttcctcatcagtccccattaattaaagatactctctcttcaacattagcatgtgtacttgcattaaaacgatggaatgttgggaaagaccaaattaacaaaggtttacattacattgagtcaaattttgcttcagtcactgacaaaaatcaagcatctccatttggttttgacatcatatttcctggtatgcttgagtatgcaaaagatttggatataaaactccctttaaaccaaacacatttgagtgtgatgttacatgagagagaattggagctaagaagatgtcattcaaatgggagggaagcatacttggcatatatctcagaaggacttggaaatttaaatgactggaacatggtgatgaaatatcaaatgaagaatggttctcttttcaactcaccctcagcaacagcttctgttcttattcatcatcaaaatgctggttgtcttcattatctaacttcactcttggacaaatttggaaatgcagtcccaacagtttaccctattgatttatatgtgaggctttccatggttgacacacttgaaagattgggaatcaaacgacatttcatggtggaaatccaaaatgttttagatgaaacatatagatgttgggtgcagggggatgtgcaaatattcatggatgttgtcacttgtgctttagcttttcgggtattaagaagcaatgggtatgaagtctcttcggatccattggctaaaatcaccaaagagggggattacatgaattcacctgaaaagcctttcaaagacgtatacacatctcttgaagtttataaggcatcacagatcatatatcaagaggagttagcttttagagaacaaaacttgacaagttatctcccttcaagtaacaagctctctaattatattctcaaagaggtggatgatgctcttaagttcccctttaatggcagcctagaacgcatgtccactagaagaaacatagagcattacaatttaaaccatacaagaatcttgaaaactacatatagctcatcaaacattagcaacaaagattacctaaagttagctgtgcaagatttcaatgaatgccaatctatctattgtgaagaactaaaagatcttgaaaggtgggtggtggagaacagattagacaagctcaaatttgctagacagaagacagcctactgttacttttctgctgcttcatttctttcttcccctgatttatcagatgcccgaatttcatgggccaaaagtagcatcctcactacagtaattgatgacttttttgatgttggaggatctatggatgaactggtgaactttgttcacatcattgaaaaatggaatgtaaacgttgaaaatgattgctgttcagaggaagttggcgttttatttttagcacttaaggatgcagtctgttggattggagacaaagcttttaagattcaagaacgcaatataacaagccatgttattgaaatttggttggatttggtgaagagtatgttgagagaagctatatgggcgaaagatggttcaattccaacaataaatgaatatatggaaaatggttacgtgtcatttgctttaggcccgattgtcctccctactctttactttttaggggtaaaattgtcggaggaagttgttcagagctccgagtatcacaagctttatgaggttatgagcactcagggtcgtctcatgaatgatatccatagcttcaagagggaaaagaaggcggggaaattgaatgctgtggcattgtacatgagtgatggaaagagtgggagtgtggaagaagaggttgtagaggagatgaagattttgacaaaaagtcaaaggaaagagatgatgaaattagttttggaaacaaaaggaagtgttgttccaagagtatgcaaagatgtattttggaacatgtgcaatgtgttgaatcttttttatgcgacagatgatgggttcactggaaatgccattcttgatgttgtcaaggaaattatatatgaacctgtgtcccatgagttgatataatcattgttataccaattcgtattatattattagcattctcaaaaatgaaacaagcatactagtattctagatctactcatgtttatttatttatttttttaatatagtttgttagctattattttacaaaaaaaaaaaaaa

SEQ ID NO: 369 - DNA, 463 bp, Glycine max
gaaagggtacttgaaggatgttggtgctgttatagagctatatagggcttcacaagccattatacatcccgatgaatcaattttggtgagacaaagtttgtggacaaaacatcttctgaagcaggaatcctccccttacagattatatgctgataaacttcgtagttatgttgacctagagatcaaggatgttcttaattttccttatcatgcaaatttggagcgattgttaaacaggagatcaatggagcattacaacacagtagaaacaagaattttaaaagcatcatatagatcttgcaatcttgcaaaccaagaaattctaaagctagcagtagaagacttcaatatctgccaagcgatacacattgaagagttgaaacagctttcaaggtgggttggtgagagaagactagacacacttaaattttgaaggcagaaactggcttattgttacttctcc

SEQ ID NO: 370 - DNA, 274 bp, Glycine max
  misc_feature (1)..(274): n equals unknown
taaccatttccttttaacatcttcttcttcttcttcttctatctctcttcaccacttctccaaatcctctctaaataccgtgtcgtctaatactaacaacaaacaagatataagatacagagcaatatccaaaccacaaacacaagaatattcagacatatttcaagatagtctagcaacattaaagtttcataagattaatataaaagatgacatagaaaagaancaagacattggaacttgtataacaaataagatcaagaatagagtgaca

SEQ ID NO: 371 - DNA, 3103 bp, Gibberella fujikuroi
caactgctttcttctctcatcaacacaaatttgaagtttgtcactgtagtggatctggaatacttacacaagatgcctggcaaaatcgagaacggcacccccaaagacctcaagacaggaaatgactttgtatcagcagcaaagtcgctgctggaccgcgccttcaagagccatcatagctactatggtctatgttccaccagctgtcaggtatatgacactgcttgggtggccatgatacccaagacgagagacaatgtcaagcaatggctgtttcctgagtgcttccactatcttctgaagactcaggccgctgatggtagttggggtagtctccccacgacccagactgctggtattctagacactgcttcagctgtgcttgcactcttatgtcacgcacaagagcctctgcagatactggacgtctcgccagacgagatgggtctcaggatcgagcacggggtaacttctttgaagcgacagctagctgtttggaacgatgttgaagataccaatcacattggtgtcgagtttattattccagctttactttccatgcttgagaaagagctcgacgtgccatcttttgagtttccttgcagaagtatcttggagaggatgcacggagagaagctcggccatttcgatttggagcaagtatatggcaagccgtcttcactacttcactcccttgaagcctttcttggaaagcttgactttgatcgcctttctcaccatctttatcatggctctatgatggcttcaccttcttccactgcagcctacctcattggtgcaaccaagtgggacgacgaggctgaagattacctgaggcacgttatgagaaatggtgctggtcacgggaatggtggcatctcaggcacctttcctacaacacattttgagtgtagctggatcatagcgacactcctgaaggttggcttcactttgaaacaaatcgatggtgatggcttgcgcggcttgtcaactatacttctcgaagcgttgagggacgagaatggagtaattggctttgcaccccgtactgctgatgttgatgacactgcaaaagctcttctggcattgagccttgtcaatcaacctgtcagcccagatatcatgatcaaggtctttgaaggaaaagatcacttcaccacgttcggatctgaacgtgatcccagcttgacttccaacctccatgtgctgctgagtctcctgaagcagtccaatctatcgcaataccacccacaaatcctgaagaccacgttgttcacttgccgatggtggtggggcagcgaccattgcgtcaaagataaatggaatttgagtcatctatacccaaccatgcttctggtggaagctttcaccgaggtacttcatctcattgatggtggcgagctttctagtctctttgacgagagcttcaagtgcaagatcggcctgtcaatcttccaggctgtactacgtatcatcctcacccaagataacgacggatcttggagaggatatcgcgagcaaacatgctacgccattctagctcttgtacaggcacgccatgtatgtttcttcactcacatggtggacaggctacagagttgcgtcgaccgtggcttttcgtggctcaagtcctgcagctttcattctcaggacctcacttggacgtcaaagacagcatatgaggttgggtttgttgctgaagcgtacaagctagcagcccttcagtcagcaagcctagaggtgcccgccgctactattggccacagcgtcacctcggcggttccatcatcggacttggagaagtacatgaggcttgtgcgcaagactgctttgttctcgccactggacgagtggggactcatggcgtcaatcattgagtcctcgttcttcgtgccccttctacaagctcagcgcgttgagatttatccgagggacaacatcaaggtcgacgaggacaaatacctgagcatcattccttttacttgggtcggatgcaacaacagatcccgcacatttgcatctaacagatggctctacgatatgatgtacctgtccctcctgggctaccagaccgatgagtacatggaagctgtcgctgggccggtattcggtgatgtctctctgcttcaccagaccatcgacaaggtcatagacaacacaatgggaaacttagccagggccaatggtaccgtgcacagtggcaatggtcatcagcatgagtcacccaacattggacaagttgaggatactctcactcgcttcaccaacagcgtgctcaaccacaaagatgttctgaattcaagctcttctgaccaagacactcttcgccgagaattcagaacgttcatgcatgcccatatcacacagatagaggacaacagtcgcttctccaagcaggcctccagcgacgctttctcttccccagaacaatcgtacttccaatgggtcaacagtacaggaggcagtcacgtcgcctgcgcgtactcattcgctttctccaactgcctaatgtcagcgaatctgctccaaggcaaggacgcatttccctccggcactcagaaatatctcatttcatccgttatgcgtcacgctacaaatatgtgtcgtatgtacaacgactttgggtccatagctcgcgataacgctgagcggaatgtgaactcgatccacttccccgagttcacgttatgtaacggaacgtcacagaatctcgatgaaaggaaagagagacttttaaagatagctacgtatgagcaaggttatcttgatcgtgctctcgaagctctggaacgacagtctcgtgatgatgcaggtgatcgtgctgggtctaaggatatgaggaagctcaagattgtaaaactgttctgtgatgtcaccgacttgtatgatcagctttacgtgatcaaggacctttcaagcagcatgaagtgagggaatactatggagctggtaattttgatatgtattttcctctagtttatttgaagacacatagtttcagtaagtgctcacaagactgcaaacccatcaaagcttggtccgtctgatatggagcatcggatacatggtttgcactcccgcaaagaaattcaacactcggcct

SEQ ID NO: 372 - DNA, 306 bp, Lotus japonicus
gaattcggcacgagcttatttaagcctttgttttatatccttagtactactattgtgtgatttaacattactcttctttcacaggatggcttatgtgaacaacaataattatctggagcttgctaaattagattacaatagttgccaagcattgcatcaaacggaatggggggaaattcagaagtggtactctgaatcaagattgggagagcttggattaagcaggaggagtcttctgttggcctattttctggcagcagctagcatctttgagcctgagaggtaccatgtgagacttgcatgggc

SEQ ID NO: 373 - DNA, 439 bp, Glycine max
ctctcttgtctaccttagcaagcatccttgcattaaagcaatggggtgttggtgaagatcaaattaataggggtcttcgttttattcaatcaaacattacttcaatcaatgatgagaatcaacaccctcccataggatttggtatactttttccttctatgattgaatatgcacaaaatttgggcattaacctcccaattggagctacaagcttggaagcaatgatccagaagagagaaatagagctccacagaggtagtcaaagcaattcagatgggaggagagcatatctagcatatgtttcagaaggaatgctggaatcacaagactggaaatcaatcatgaaatatcaaagaaagaatggatcgttgtttaactcacctgctacaacggcagctgtttttcagtgccataagaatgctgaatgtcttggttacct

SEQ ID NO: 374 - DNA, 151 bp, HUMAN
taccagacggcgtaggcggagacgtgggcggggtggttatccgggtacaacggccgcgaggcggatggctgcgcggggtgcttcggatgcgatacatcgtcttaccacgtcgcggcagcgtcgcgtcacgcgcgcgcgcgtctgtcaggcg

SEQ ID NO: 375 - DNA, 1559 bp, Zea mays
ggatacaatgtctcttctgatgagttgtatcatgttgttgaagcttccggactccataattcacttggaggatatctcaatgatacaagaaccttgttagaattacacaaggcctcgacagttagtatctctgaagatgagtctatcctggatagcataggctcaaggtcacgtaccttactgagggaacaactagagtctggtggtgctctacgaaaaccttcactctttaaagaggtggaacatgctctggacggtcccttctacaccacattggaccgtctacaccataggtggaacatcgaaaatttcaatattatagagcagcacatgctagagacaccatacttgtcaaatcaacataccagtagagatattctagcgttgagtattagagacttcagttcctctcagtttacttaccagcaagaacttcaacatcttgaaagctgggtgaaagagtgcaggttagaccagctacaatttgcgcgacagaagttggcatacttctacttgtctgctgctggcaccatgttctctcctgagctgtctgatgctcgaactttgtgggccaaaaatggtgtgctcacaactattgttgacgacttctttgatgttgcgggatcaaaagaagaacttgaaaaccttgtcatgttggttgagatgtgggacgagcatcacaaagttgagttctactcagaacaagtagagattatattttcttcaatttatgactcagttaaccaacttggtgaaaaggcttctttggtacaagaccgcagtattaccaaacacctagtagaaatatggttggatttgctaaagtctatgatgacagaggtagagtggcgtttgagcaaatatgtgccaacagagaaggaatacatgataaatgcatctttaacatttggactaggccccattgtattgccagcattatattttgttgggccaaagatctcagagtctattgttaaagatccagaatatgatgaattgttcaaactgatgagcacatgtggtcgcctcttgaatgatgttcagacttttgagagggagtacaacgagggcaagttgaatagtgtttctctcctcgttcttcatggtggctccatgtccatatcagacgccaaaaggaaattacagaagcccatagacacatgcagaagagacctcctaagtttagttcttcgtgaagaaagtgttgttcctaggccctgcaaggaattattttggaaaatgtgcaaggtgtgctacttcttctactcgacgacggatgggtttagctcacaagtggagagggctaaagaagtggatgcggtgatcaatgagccactaaagctacaaggaagtcatacgctggtgtctgatgtgtgaaaggaactaagcgtcgatgtgatgtgttcttttgatttattagtagttgtgttttctctatatggtggtttggtaggtgactgtataatgtaaaggagttggcacatgttgtcagtgtcgtaacatcttcttgatctattcagcgctctcttgggcttgcgttaaaaaaaaaaaaaaaaaaa

SEQ ID NO: 376 - DNA, 80374 bp, Arabidopsis thaliana
aagctttaagatcattgattttgattttacattctaaaatgacggaatcgttgtatcggctgcttatttagggttttgggttttttgtgctgttggtagcttttaattgagtgtatttggtatttttggattagttgaaaaatggttgggttagtttgaatccaattctcgctgagaattttatgctcacgatcattcacataagagattccgctatctgaagaaatcgaagcatgtgaaattttcccttttcctttcgatgtctgcgtttcgctgcgttgtcatcttttgttcttgccatgggacttaaaactaatatccttatacttttcattgcagcttaatgtttaacggcatcaccagcatcttgaaggagtactagttttggttagattcgtcatacatgtgtttgaattagagtaatttgaagggctgttttgttttgtgatggataaagctagacatcaacagctttttcagcattccatggaacctggttatagaaacgagactgttcctcaaccatttatgcctgatcaaacagggagcgcgagtgctaatatgcgacctcccaattctaatggttcagatgttaaggcggtgcataacttctccatacaaacaggtgaggaattctctcttgagtttatgcgtgatcgggtgattcctcagaggtcttccaatcccaatggagctggcgacatgaactataacactggttatatggagcttcgaggcttgatagggataagtcacacaggatctgagtgtgcttcagatgtctcaaggttcagcactgtggaaaatggcaccagtgatattgagaggactaactcttcgcttcacgagtttggaaataaactaaatcatgtccagtcagcaccacaagctttactaagtaaagatagcagtgtaggaaatttacatggatacaagaacacgtcttcttcagcctcaggtagtgtaacagcaaaggtgaagatcctttgcagtttcggtgggaaaatacttccacgtccaggtgattcaaagcttcgatacgttggaggtgaaacacacattatatccataagaaaggatatatcttggcaggagcttaggcaaaaaatccttgaaatctattaccaaacacgtgttgtaaagtatcagcttcctggtgaagatcttgacgcgttggtgtctgtatcatctgaagaagatctccagaatatgctggaagaatataatgagatggaaaaccgtgggggatctcagaagcttaggatgtttcttttctccatcagtgatatggatgatgctcttctgggggttaacaaaaatgacggcgactctgagtttcaatatgttgtagctgtaaatggcatggacattggatcaggaaagaactcgacccttcttgggcttgacagctcttcagcaaacaacttagctgagcttgatgtgcggaacactgaggggatcaataccattgctggagatgttgttggagtcggcgcatcacagttaatggtgaatggtttccaacaaacgtctgctcaacagtctgagtctattccaccaagctcatcgcttcattattctcaatctattccactgaatgctgcatatcagttgcagcaatctgttccgccaagctctgctcttcattatccccagtccattaccccaggttcctctcttcagtatccccaatctattacgccaggctcctcttatcagtatccacaatccatcatacctggttctgccagctcctatggaatatacccacaatattatgggcatgtggttcaacatggagaaagagaacggtttcctctctatcctgatcacagttctaactactccgctatcggggaaactaccagttccataccgatccaagggcatgtcagtcagcaaggtggctgggctgaagggtatccgtaccctggcagcacacccaaaagcacacaagcgctagcagaggagcaaaaagtatcatctgatatgaaaattcgtgaggaagttgagcctgaaaaccgtaaaactccggggaatgatcaccagaatcctccccaaatagatgatgttgaggtgaggaatcacaatcaggtccgggagatggcagttgcaacaactccacctagccaggatgcacatttactaccccctagtagagatccacggcagaacactactgcaaaacctgctacctaccgtgatgctgttattactgggcaggttcctctatctggtattgaagatcagctttcaacttcaagcagtacctatgcccctgttcatagcgactctgagtcaaatttaattgatcttaactacccggagcctgagcagtcttcccaaagggtatattgctcagagagaatacctcgtgaacagctagaattgctaaatcgtttgtcgaagtccgataactcattaagctctcagttcgtaacgtctgagtcaccagcaaacactgcacagcaagattcaggaaaagaagcggttggaaagtcacatgacgaattcaagactgttaatgatgatgccaatcaccatacgcacaaagatgtggaaacaatctttgaaaaagtaggagtatcagatgaaactttggaatccgagcccctgcacaagattgtaaatcctgacgatgcaaacaagaacagagtagtcaatggggcagatactgaaattggtgtttccaacttgagccatgtaaacgcagccatgagtcatgttattcctgaagagcaagcttcgctgcagggagatattcttattgatatcaatgaccggtttcctcgtgacttcctctctgaaatattctcacaggcaatctcagaggatacatccactgtccgtccatatcctcacgatggagctgctgttagcatgaatgtgcaaaatcacgatcgtaaaaactggtcatattttcagcagctggctgaagatcagtttatccaaagagatgttgtacttgaccaagctgattctcgcattccatctgaccgtaaagatggtggagagagctccagattgccttatgtctcgccattgagtagagatggtatttcaacaaaccttgctaatcctcagttgactttaggtcaagattatgggggtaatttttctgaaaaggatgggggtggcactggcagcattccccctgctctagagaatgaacagatgaaggtcactgagagtgaggaatttggtgccatggtggagaatcttaggacgccggattctgaaccaaaggtatgagttagtggcagtttttattttatgatttccaaaaccactgtgtttctgaagagaatggaacatctaggatgaaaagacagaaacaaggcatgctgcgcttcctccacttggctcagagtttgactacagtggcttgcaggtatgaaaaactttgaaaatatacgtctgacaaaactcgtactatctatgcatgggaaattctttgttggggtccatgttggtggaatcagcattatgtttaaccccgactagtttttgtctgtgcgtcttgtttcattttcattgcgctagttctgtcaaaacaattctctgcttctattttcttagtgtttctgctgagctccttttctgtgtttggtttacatagatgtaaaatagtatactcttaaatattactagatcattaagaatgaagatcttgaggagttgagggagcttggttctggtacttttggaacggtgtatcatgggaagtggagaggatcagatgtcgctatcaagaggataaagaagagttgctttgctgggcggtcatcagagcaagagagattggtgagttgtttgcagatcatgtctaatgcatctccctttttgccatgcctaaaattcatgcacctgtgttaatttgtcacactatctagactggtgaattttggggggaagctgaaattctttcaaagcttcatcatccgaacgtggtagcattttatggtgttgtaaaagacgggcctggagggaccttggcgactgtgacagagtacatggttgatggttctctgaggcatgttctggtccggaaggacaggtaaagttcggcttgttaggttctctgatatcactttaattggttccagttcgtttatcttataaagttttatctattttccttctttgtattatcaggcatcttgatcgtcgtaagagactaatcattgccatggatgctgcatttggaatggaatatttacactccaaaaacactgttcactttgatttgaaatgtgacaatttacttgtgaacttgaaagatccttctcgcccaatctgcaaggtaacacgattgctagaccttcccgtcgatgaatttagtttaatatgatttttgaataaatcgcattaatatccgcatgctcttctacctcaggttggtgactttggtttgtcaaaaatcaagagaaatacgttggtatctggtggtgtacgtggaaccttaccgtggatggcaccagagcttctaaacgggagcagtagcaaagtttctgaaaaggtaaacattaatatgataagatgcacagtaaatatcaattaccactttaactgctagaatgatgaatcctctgcaacagtcacctatcttcccgtttatgaaaagctgagatgaatagtgtttagtttcttgagatgagaatcttatgttatcacaaactgactgagaatgcaactaaactagaagatctgttatattcttgtttttttgcctgcaggttgatgttttctctttcggtatcgttctgtgggagattctaaccggagaggaaccatatgccaatatgcactatggggcaataataggtgcgtgcaagtaactcatggtctatcgagtttctgcctgttcattcttgttctgaatgccgtgggtatgaaatttaagatgatgatgacttcattgtgaaagtgcaggtgggatagtgaacaacacactgagaccaaccataccaggcttctgtgacgatgaatggagaacactaatggaggaatgttgggcaccaaacccaatggcaagaccatctttcacagagatagctggtcgcttacgagtaatgtcatcagcagcaacttcaactcaatccaagccatcagctcacagggcttccaaatgaaaaacctttctttttcttatgtgcagtgaaaagagaacataagtcgattacaaagagtccaattcttttatactttttcgatttggggtttggagagagatatttcttgatccttctcctttcctttttttgttctttaacaaaaacaaacaaaaaaaagttgaaaagtttattccagttggttgaaattgttttgtcacatgtatctgttgaatacacatgcatcccttttatagctatgcactgtgtttgcaaagatgaagaattcttgaccaggcaaataacaggaaaggttttcttatgtgagcatatcatatggtttctctgaaaatgttcaactgcagatatatatcatcaaatacagacagacacagtacaaaatccggctgggccaggaacataactgcggatattctatacctaaaccaatgatggggggcaaaagctcttttaagatgatttttttagattgatcaaacctttttggttttcactattgaagaagttgggaacaatcctgtggtgtgacaggataagagtaaagcttctagcttctgtggagtggcgcagcacgtaaatcaactggctgatagctcactcgatccttgtgaggtaaaagctcctcctgaaaagaaagaacaactagtgtcacacacttaaaatgggaactagagctgaggattgaggatcaacaagaagataatatatagactacatcatcagggtttatctggaatggcttcacaaaatcctcaaacattaacggagaaagatccttcattttctcttccacttcctacaaaatgaaagcaatatttcttcagactgagagtatctaagcacataaaaggtcataatgaattgtcattgaagtttcagaaagtgtaccaatccagtaatccttgatttttctaataactctctggtgattaagtccagaatgtgcctgtttgctctcagagcattcatcgcaagttcttcagtctcctcgatatactgtcaccaacattcaaataccatctatatgttcaagctccacatgggagagtttaaatcagattaggtgtgctgagtcgaagataaattacccttgtcaactcacgggtgaatagctcggatacttctaccgacatctctgctggcattacatgaggatggtcccactgatataacatcaccaagttgaaaagaacgtgaggaactactgagaatatgtaagatcagcaaaaatgggatagtatcagtctctgattaatggatatacccggtattttatcagctcgccgtctgggttatctggtaaatccaccattccaatcttttttacaagttgagtgagacctaatctcgcactttgagggctaatcaccatctccctggcaatctgaaaatgtaatgtcaggtcaaatttagaatggaagactaaacattaatattactcaaaacacaagcactttgcagatatgcagttacatagatgttattttagctaccgagttgaaggtttaatcagaagctgaaaagcaaggcacagtaattagttaaacgagaaagggagagtacttacttttgttatcttctccaggtcatcttttcctccatcagtgacattatcgccaaaaaccacacgttcagcacagcgtccaccatgagctaccaccatttgcattttcatataaccaaacgtggtatacccttggtctaccatgtcttcacgtggatagaaaaccgatacagcagtttcctgtaagattcaagagaaaagtttatttaatccattcttacactgtgttgactgttgagtgttcaaacaccactatcattacaactgaaaaatatatatttgaaacagaccttgccaccaggaaggagctgcgaaaatgcatgccagtcaaatcgaggaaacaaatgagccaacactatatgaccagcctcatgaacagccagaagtctcttcttttcgtaagatacctaatattacataagctttaacggttagggcttttttagctgtggagcatagtatgttttgagataaatagtacaaaggatgtcagtacgaacactttgttcacatttctgttgctcttcctctgtaagaagtacacccataccctcgagcaattgtttatctaacacatcaacaatgtcttgttgatatatgtaagaacgtcccttccttacctgtaaaattggattacgatcaacaacgctcctctagaaatggtataactaaattgggaaattgagatccacataagaatatgacataccgacattatagccgcttcgttaacaagattccggatatctgccccggaaaagccaaccgttcgaaaaacaagctggatgtgaaaaaggatatagttgttatgaatgagcaaacacctatatcaaacatgttattgggattgaaaaatagcaggaaaacaacttgccttcccaaagtctatatcttctgcaaggttcttcccagcactgtgaactccaaatatttgcaccctttgctttgcatcaggcaacccaatatacagccgacggtcaatacggccagaacggacaaactcaaggtcgagttcatcaggtctattggtagcacagataaatatcacagcttgtctcaaagaaaacctatcgatacctgtcttctctttcctgcaggtggtacaatattaagtatgaaagccttgatacaaacccgatgaaaacatgtacatatcactaagatttataaacaagtgcagattctcttactccccatcgagttgcgcaattaaagcttcaaaagttgctcttctccgtggatcttttctagcatgtctaccagcaatagcatctatttcatccacaaacacaaaagcaggggcctggagatagtatataaaattagatccacaataatagtgtgagtagaagacaactataccgtatgagctttaaaacacataactaagaaccttacatttcgtctcgcgattgaaaacatctcattgatctttgcagcaccacttttttcactgtctgtgaactccgcaccagatgcaaacacaaatggtagcccactttcctttgcaagtgttcgcgcaaaaagtgtttttccagttccaggaggtccagaaagaagcacaccctgactcaaaaatgaaaacagaggagagtttgagcttagcttagacagttaaatggaataaaccaatatccacatgttagtttttgggtcaagatgtaatttaccctgacaaaagccacatctttttcatagtattgcattgggttccccatgtagatcattagctcatcaagaagatcccagacatcaccgcctagtaccacttccttatacattgattttgtctcactgacatctccaaccggctgtatgataattaaaactcatcaatagaagtgtgaatatgtgggaagaaggcaactaaacaaagaagtaacgaggttaatggtatacagtaacgatgattaccaatataaaattttctgcataagccatatcaaacagctgattatacttcttgtagagaaagcgcttggatgtgataaggagaagcatggcagattctcttataaaccataaaattagtatccccggcagaagtgcaatgaaaactttcatgaagtagtggatctgcctcttctgaagaagatccacctcaactccggcgttgcaaatagtctcaaacaagtaaggatctaagggaatgtcaacctagaaataaaaaggatatgacatggtgaatgtacatcattcatttccaaatacttgcaactataatttttttacttacaatatattctagagggaaaccttctttcatggtcacatacaatctctttaggtcttccgtgaaaacaacagctgcaacctgttatgaacacatacacagattatcgtgccaacataagctaaaaaaaagatctatcatcctatcacgtccagcttcaaattaattgctttggaaaaggaatatattcatcatattttaactcataatgaatataccatcacttgttatcatttaaaaaattcaactggatataatgacacttgccactcacaatcccaaagccggacaagagtataggttagagctgtacctcagaagaatcaagcttctgaaggaagtaggtatagggaagcttagggcgatatcgccaccatctctttgatatccagagagctctagttccctcagtttcagatgtccttccaataacatcttcgcgaagacttttctctacctctttcatatcaaattcaaccacatacttcgccgctgaggagtttaactgttctgataatttttctcgttctaacatttccttccaggttgcaagcctttcccgccaattacctacactgtctccaatttcacctatcatagaagaatgcaatagaggattagatggtcaaaagcacaggttaccaatgatagtagatgagggatctagaagtgctgctctgaaagaaacttgattagtgagataagattaggtcgtcaaaaacaaaggtttcgcacaataaatcacttcttgttatatcttcagcatgccactactaaacaagtatcacctaacgaatgtatactgaccagagacacccagatcttggcttagtttcttctttgcctctgtctgaatcctagcatttctaccaattattttcttgagagatccctctgtggtctctagatcgtcatcccacgcattttctccaacataagaactatcgtggacaagtgttccatcaggcgcttcaatgaacctttttaatttcaagcctttaggtgttgctttcctccacatatttctcttgaacctgaaacactagaataagtcaggacattctacaaaatcaaataaacagaagttcttttagtcttcccactcttgacgctttagatgcctcattagctgagtatttacttgttaaaggatgataccatagtttgaatatgaaccatattttaccatgtcccagtagagaaaattacaatcggaaactgaggattaggaagcacctacttttctatatttccaggagatggctcggggatcaaagcctccataaaagactctgttaactctcttctctctcgttctacccgaggagcttggatggcaacataaactctttgacaagaaagtaacagcgcaaaagcatatatgaacaaggcagcaactcgtttaccgtcccaattcctgatgtcctgatacaatacatcttccctcattaagaaacaacctaatacactagtatatgtcgctagaataagcgtagttgtagtctcctccaaaatttatgcttccgttaaatcaacaacaaaataaataaataccatacgtttgtccctcaatgttttagaacacaagcagaagtctaacaatacttgagaatcagaaatttgataattacgttaaaaagctgaaccagcttaccttccaatgctcccacttgttccaatcaataaacgaaggcactgtctcattcttaaagcgagtcagctcgtgatggcccttgtgcacactatccttaactcgagccacatactcattcactctcccacttgcttcttccgagtcaaacccaatttctgtcttcacagattctccaatcttctccccaatccgctcggcaccaaggcgaatagactgagccaatctcacccacgaaaagcctccatcgctattagatgaagacccactactactttcagacgcatagactcgaaagagctgttttttccgggtagctcccagtccatacttggcgggaaaccgaacaagaccaaaactttttgatcttttcaacaactgagtcgatgaagagataagcggattcggtttatacgaaattgcaatctccatgaatgaaatcacaagaaaaaaattaaaaagagaacaaaaccagacgcatttgaagatttttcccgattaaagagctctctctgagaaaattactgaaggaaaatggtgagtaccaaccattcagctcactcgactctccggcaagacttacgcttctctccggtaaggaggtttatctacactgatccgtcgttgagagtgtcctaatacttcgaaggagaaagatgacgcttaaactcaaagaggctcgaagcctattagttatataattgggctagcccattaaggtccatcagcccactatccgaaaaataatatatttaaaccgtggaatccaaggagagacacagtggcaaaaagggtaattatagggacatttcttggggtgttgtccaagctgcttttatataaggaagggatattgttctctcgcttctcgaaagatccattcaccaactctttataccagcctctgtaacgttcgatcatcttgtatttcatttcaaccactcatgtaagtatattctttcttcagattccgattgttttcttcgattaagttttgagctagattctctagatctgtttcaccgatttggttgatttctccgtcaatctgaactcgcggtgtgcatcttgttgtttgcagtgtttttagtttgttttacgaagaatcaactatggcgacgaagagaagcgttggaactttgaaggaagcggatctgaagggaaagagtgtgttcgtgagggttgatctcaacgttcctttggatgataactctaacatcaccgatgacaccaggattcgtgccgctgttcccaccatcaagtacttgatgggtaatggatctagggttgttctctgcagtcacttggtatgatatcttatctcagttctcacttcactacttgcttatctgttgtaattttggtgtgggaattttgatctgatctgtttatccggagagccatgcgtataagaagagtctctttgcatgttaggatgtagatatagtattcttgtttttcaatatgttcattgactctatcggttgattttctggtgttgtttgggtaattgttttagtaagtttacttggatatgtttatactcaagttcaattggatgatgctgttgaattaatggatgtatctgatctcaatttatgtttcagggccgcccaaaaggtgttactcctaagtacagcttaaagcctcttgtgcccagattgtctgaacttcttggtgttgaggtttgttcctcttcctcttctagacttgcaaggtttctgaacattagcttttaaaagaacactgttctcactctgtttgtgttaataggttgtaatggcaaatgactctattggtgaggaagtccagaagttggttgcaggactacctgaaggtggtgttttgctcttggagaatgtgaggttctacgccgaggaagagaagaatgatcctgaatttgcaaagaagcttgctgctcttgccgatgtttacgttaatgatgccttcggaactgctcacagagctcatgcttccactgagggagttgccaaattcttgaagccttcagttgctggtttcctcatgcagaaggtatttaaaatttgcagcataaagagtatcttcttagatgagtctctttattttactgatcagactattacttgttttattgtgtcaggaacttgattaccttgtcggagctgtggcaaaccccaagaagccttttgctgccattgttggaggctcaaaggtttcaacaaagattggtgtcattgagtctctcttgaacacagttgacatcctcctgctcggtggaggtatgatttttactttctacaaggcacaaggactctcagtcggatcttcccttgtggaggaggacaagcttgacttggcaaagtcactcatggagaaagcaaaggccaaaggtgtctctctcttgctcccaaccgatgtggttattgctgacaagtttgctcccgatgctaacagcaaggtaactatcacagtcattgtggttgactctcaatgggccatgtatgaaagtaaaacatttaagcgtctggtctggtctctttaaagctgacacatatgactcttgcagatagtgccagccactgccatccctgatggctggatgggtctagatattggtccagactccatcaagacattcagcgaagctctggacacaaccaaaaccatcatctggaatggtcccatgggtgtgtttgaattcgataagtttgctgctggaactgaggtatgagcaactaaacacatataaacacaagttttagtctcacttttgtctaaatccatttgtcttcaacatgtttgttaatcatctgtcttcaacatgtttgttaatcggagaaacccaacttaactaacccaatctcttgtcttgtttcaccatcaggccgtagcaaagcagcttgcagaactaagcggaaagggagtaaccacaatcattggaggaggtgactctgttgctgccgtcgagaaggttggtttggcagacaagatgagccacatctctaccggaggcggtgctagtttggagcttcttgagggtaagccacttccaggagtcctcgctctcgacgaagcttgaaaatcctcacgttggatttcatcgctattttgtgttgttatatgtataacaagtcgtctggttatcttgtgaccagacgagcaagccattatttatcagcttgagattttcgtctacggctctctttttatgagttttttagtttggagcctttttttaataataagagatgaaactctgattgacgacaaaaaaagaaaagaaatgaaactctgattagcaaactcctccatacttcaaccaatgatttgtctcttgcctataattgtccatttaaaacgaaacaagatcgttgggacgcataattggcttaacatgttttagaaaaaaaaaaaaaaagaagattcgtattccatcttatttgttaacaactaaaggagatataaagaaaattagaacaccttttactaaagaataccgtgtgttctctacgctaagcggcatacacctatttttggaggagcaacttcatatgaagtccgctccattaaatcatcagttcgataattcttagctaaatagtttctatagagtcgattgttattgagttctcattagacaagttaaaggcccagaaattgcccaataacgacaaataacgacatcagaaatcgtcccacatcggatggaacagaaagtagatgtggaaggattcacatataaaatgcattggtgcactcacttcagaagttatggagccgtgtggtgaatacaaagcgaactattctttcgccttttactaaagaataccgtgtgttctccacgctaaacggcatacaccaatttttggaggagtaacttcatctgaagtttgctccattaatccctcagttcaatctttagttgattaaccattagtaatagtatacaattacttgacaggaaaaaataatgagattatctgaccaaagattgatgccggttctgaagtcttcaggagcggttaagtgaaccaagtgctgggttcaactcatagcgattatagatcgatttgttatttatttgttgataatttatttcgattatagaatccattgaagatcgattactcaacggaaggttatcaagtcagttagtactgcggttaactagtgggttactaaactcaaagttatgatacttattagacgtagctcgtttagtgtgattttgaagagataagaatatatatttggcattattagttagaagatttatgaatttgtttgtttttgtatttgcatttttcggttttctaattctaatatgtaggaatctgatagaagattttattctgtacccaaaaccgagacgttccactaattctcgataccggtttacccactaaccggctgaaatcgatccagactttgctccgatggcagaaaacccttgacgatcaaagaaagccgtcttcttccccagacagagtctcttccatctatctttaatcggaggaggatttgaaatctcttcagatcaccggaagttctgtgagctttctctcccgtctaatctctccgaccaatccaagtgaaggtgggcggcggagtattgccgcctaattcttatctcatttggtgttcttcatttgttagtcatggaatccaatccccttctaaacccctaatttctgcatctacgaactctgcaacaatgagatttgatttctcatcggcttcgcatttactatgaaaccacagatgttctttcgatcagtcattcagttctattcaaagccgtcatggatgcaacgttcctactcttccggtaacgccgaattcaatatctccggcgaggtcatcagcattctagctaagaagaaacctatagagcctgctttggagccgcttgttccgtttctctcgaagaatatcatcacatcggtaatcaaagatgaggtcaatagacaattaggattccgtttttttatatgggcgtcgagaagagagcgtctcaggagccgagagtcttttggtttggtcatcgatatgctctctgaagataatggttgcgatctatattggcagacattggaggagcttaaatctggtggcgtctctgtcgattcttattgcttctgtgttttgatctctgcttatgctaagatgggtatggcggaaaaagcagtggaatcgtttggaaggatgaaggagtttgattgcagacccgatgtgttcacgtacaacgtgatattgcgagtcatgatgcgagaggaggtcttctttatgctggcttttgctgtgtacaatgaaatgctcaagtgcaattgttccccaaatctatacacgtttggtatcttgatggatggattgtataagaaagggagaacgagtgatgcacagaagatgttcgacgatatgaccggtagaggaatttcgcctaacagagttacctataccattctcatttcaggtttgtgtcagaggggaagtgctgacgatgcacgaaagctattctacgagatgcaaacgagcggtaactatcctgattccgtcgcacacaatgctttgcttgatgggttttgtaaattgggtcggatggttgaagcatttgagctgttgcggctttttgagaaagatggttttgtgcttggtcttcgaggttatagcagtttaatcgatggattgttcagagctaggagatacactcaggcatttgagctgtatgcaaatatgctgaagaagaatattaaacctgacatcattttgtacacgatattgattcaagggttatctaaagccggtaagattgaggatgcattgaagctgttaagcagcatgccaagtaagggcattagcccagatacctactgttacaatgctgttataaaggctctatgtgggaggggacttttggaagagggtcggtccctccaactcgaaatgtcagaaacggaatccttccctgatgcgtgcacacacacaattcttatctgtagtatgtgcaggaatgggctggttagggaagctgaagaaatttttacggagattgagaagagtggttgttctccttcggttgctacgttcaatgctttaattgatggactgtgcaagtccggtgagctcaaggaagccaggttattgttgcataaaatggaggtcgggagacctgcttccttgtttcttaggctttcgcacagtggaaaccggagttttgacaccatggttgaatccggttcgattctcaaggcatacagggatcttgcacattttgctgataccgggagttcgccagacattgtttcttacaatgttcttataaatgggttctgcagagcaggagacattgacggtgctctcaagcttctcaatgtgcttcaactaaagggattatcccctgatagcgtcacttacaacactctcatcaatggacttcatagagtcggcagagaagaagaagcttttaaactcttttacgctaaagatgattttagacacagtcccgcggtttacagatcgctcatgacatggtcatgtcggaaaagaaaagtcttggtggcttttaatctatggatgaaataccttaagaagatatcttgtctggatgatgaaacagctaatgagattgaacaatgtttcaaggaaggggaaaccgagagagctttaagacgacttattgaattagataccagaaaagacgagttaactttagggccttacacgatatggcttatcgggttatgccaatcagggagatttcacgaggccttgatggtgttttcggttttaagggagaagaagatccttgtaacacctccgagctgtgtcaaactgattcatggactctgcaaaagagaacaacttgatgctgcaatagaggtgttcttatacactctagataacaacttcaagctgatgcctagagtttgcaactacctcctaagctccctcctggaatcaacagaaaagatggagattgtttcgcaacttacaaacagaatggaacgtgcagggtacaatgttgactcgatgcttcgattcgagattttgaaatatcatagacatagaaagcaggtgctgatagatctttaggtaatgaaatgattattaaaggtttatctacatccggattcataggcattagttttgtggagaagagaaatatgagttttgattcgaatctctttaccttaacactacattagaatagaaaaatctctggaaccggaagctctttgaggaaaaggaaaaggaaaaatatgaggtttatacgtaaatgctttgtatgctttattgttcatgaagtttttccttatctttattgtacactgatttgttttgtattatgatgttaaatttctttgaaataaagactaaacatgtctaaatctttctggtttccttccaagacctgttccaacatttttgaccctcccataaattatgtacacagcttgtttgtaagataagggagcttcctgaatccttttggttagacaaagagacatgaatcaatcataaatacctcttgattcttcgttgtggacttggcttatcagatattgttcgaatcacaagatttggccaaagtttcctgaagttgacatcaacaaaaagcatctgctgatttcaggctggaaagggccttttaaaaaaaatccccgggccatatgaccatatctgtctgacgtggcatcaccaagggctttcctaattcagtatctcagtgccaaaacgacaaaagatcacagtgaggccgactaatcatgggcctgaccgttgatccacgtgtctttgtattccacgtccaaatctcaacccttcctttacatatgccatgtcatcatctttttcaccatttttttgtgagttttatgtgtgagttttttttttgctgtcattaatttagaaacaataatctcgttgtatcagtatctctatttaatatgcaaaaatcagtcattagttttattttaataccgttgaaaaaatgcaataattcataggtgtgccgcagcagattttaacccatcaattttataggaacagagtgtgtcgtctctctacaacagtcgtaggcacattaatactataattgccttaaaaactccgttgagtagacaaaaagagtgcaattccaaagcatttcttattcttatagattttaaaaataggaaaaaggtgtaaatctgcgaacattttggattcttcacgtttgtttatattttgggttggctctacacctactctcagaagtcataagccaagcaaagggggttttagggtttttgaccgcgagccagatctctttcttttgtttctcccacttccgaatcaatggccttctcttctctcctcagatctgccgcctcctacacggttgccgctcctcgccctgactttttctcgtcgccggcgtctgatcattctaaggtcagagacgacgttttacctttaatcgatgttatgttggatatgtttagcttcgtttctgattctcttgcgtttctgttcgatttgatttgcttttagcttaggtcgtgctttgatctgcttgaatttcctttttacgcgcctttggttactttgaagaagttgtttgatgtgataaatattacttggaagttgttctgagtttcttagcgtaagcttgtgacgtttaatcctatttttgtcttcgttcttgcgttttttgtatctagtctcgtttaacgatgaatttcaacttgtgaggtttcaaatcttatttgttgctcttttagaatgtctaatggcaatacatttggagttgtttgtttttttatttaagtttttccaggaactttgcaagaaaacaatcgtatttattatcttttgtcacaaatttctcaggtgttgtcaagtcttggatttagtcgcaacctgaagccatcaagattttcttctgggatatcttcatctctacagttctgtgacaaattctgtaacatgtgtaaaagttattgatgtatgatgcacttttcgattctcagagtgtttgttttgtttatgtttaaatgtacagaaatggcaatgcaagaagtgtgcaacccatcaaggccacggctacagaagtgccatctgcagttcgaagtaagtaagaaaattaatagttttattggatgtgttttcctgttgtgtgcttattggtgaatttgatttgcttgagtagggtcaagtagcagtggaaagacaaaggttgggatcaacggtatgtgcttttattgattgatgccatttgtttgaagtcccagatcatcatttactttcttaagaattttcttttaggcccccaactttttccgtttcttatggaagctcatttcttttttctgtgagtgctgcaggttttggtcggattggaaggttggtcctccgcattgcaacatcaagggatgatattgaggttgtagcagtgaatgacccattcattgatgccaagtacatggtaaggatgccttacaatctgagtcatgttcttgcttgcttgaacctggtatagtttgagaaaacattgaaaatgcgtcatatgttagtcctctttttcactgaacaaatgtctggttttctatccccctattccacaggcttacatgttgaagtatgattctactcatggaaatttcaagggaagcatcaatgtcattgatgattctactttggagatcaatgggaagaaggtcaatgttgtcagcaagaggtatcacctaaaagtggcatgttatcttctatcgctctgagaacaggtgttttcactttagaacttaatcctcttaattcttcctcagagatccatctgagatcccatgggctgatcttggagctgattatgttgttgagtcttccggtgtattcaccaccctgtcaaaggctgcatcccatttgaaggtacgttttcatacaaacaaatgttgtcgaccttgttttattattatattgtttgcttgatattcatcgtttttatagggcggtgccaagaaagttataatttctgccccttctgctgacgcacctatgtttgttgttggagtaaacgagcacacataccaaccaaacatggatatagtctccaatgcaagttgtaccaccaattgtcttgcccctcttgccaaggttggtaatgttgcacaataattttaccctcatttcattgctatgagattcattaaggtcaactaaactgtatttggcaggtggtgcatgaggaatttggtattcttgaaggcttgatgacaactgtccacgcaactacaggtctatataacttactctcctgctgcagatcactgaatgttgataacctgattacactaacctgtgtgttttggttattttttctttcagctactcagaaaactgttgatgggccatcaatgaaggactggagaggaggtcggggcgctagtcaaaacatcattcctagctcaaccggcgccgcgaaggtacacaaaaactcacatggttatcgcaagcatgtaattatcctaaatcgggaatcatatctgagctgtggttttttgatcaagtaggctgtaggtaaagttcttccagaactgaatgggaaacttacgggaatggccttccgtgtaccaacatcgaatgtttctgtggtggatttaacttgtcgacttgagaagggtgcctcttacgaagatgttaaggcagccattaagtatgcttcctaaaattttattgcccgaccagatatcgtcatcgaaacattatcgtttaatgtagaactcttaataacctctcatggtttaatgtaaacctctaacaggcatgcctcagaaggacctcttaaaggcattctcgggtacacagatgaagatgtcgtctccaatgatttcgtcggtgattcaaggttggtctctctccttttcttcatagtcatctgaatctttttttgtggttgaccaatgtggtgattccaatttggttataacaggtccagtatctttgacgccaatgctggtattggattgagcaagtcctttgtgaaacttgtctcttggtacgacaacgaatggggttacaggtacacttttgtttctcatcttatatttctcatcctagctaacagttctaacacttaaaaatcttctcccattttacttacagcaaccgagttcttgaccttatagagcacatggctttggtagctgccagccactaaatacacacaccagttcttgcagaagcttgagtctttctgctttttgcgtaacctgctctacaaagccggtttggatttgttcggttcaattaggtgccactgtgctaggtgttttgaaatatttggcttgaatctcgagcctttactctatttttgttctgttccagtatcagcaaccatgatttggtccaaaagactgaaaaactgtgcgacttacatctatgaataaggggctaagctagttgtactttaccaaaaatagcttaccagtataagcaacgtttggatacttcttgatagcgcatcgttagctttgcccgtgcttatgacaaaagatcactaaccactgaaacatattttttacaaatgaaaacagaaattgaacttgattagcctgtgtaaccatgtttcagaagaaagcttactcgttttttcatccgacgaaactcgtttggtattggcgattcctggaagggaagcatgaagatttatccattgagatggacaacctcatcatctatctcctctgtcttgtttctgatctctttcaaaacttgtttgtcttttctctatcatcaccacttaagaaaaggtggctgtttttgagttaacggaagtagactcactcaagtgaggctatagctaaggaaggacatgagttatttattggccaccatgcggataaggagaactcttgaagtaaggttactcatatattttcacttgccccgatatttcatggaaactacaacattttccacgaactattgtttattacatatgttttctaagactttatttattacagatatcgcctgaaatttcgtattattacaaaaacacacgtaaattttgtcaattccaaatatctccaaatttttgtttgttacatattgttccctcaagtttttgtttattacagattcccctgaacctctcatggtttgatgtaaacctaaaacctcaaaatcaaacaagtttgtcacagaaagatatatagtctccaatgatttcgtcagtgattcaaggtctctcttctttctctaaatacgtaacaactaacacggaaggcatttcattggctacaattatttcaaaatttatcttacaaaaaaggataatagagtgtgatattgttcatcagagacgtccacgtaagggtaaactaatcagtatatggacaaaaaggtacttgtttatctacaccaggaagaaaaacaataccagttttccggtccacaacttttgcatcaccatgcatccgcagccacgtgtgttcttatgaatattaaaatctacttatttcgttatacgacaaacgaaagatactgctttgttgcgtagacaaacaaacaaaatctcttgataataccagatattcttaattaattagtacgttttaaactcaacatacccataagaaaatccagttagctcatggtttcatgttttccaatagatatatgtgtatataattaaacgctttgcatcgtttgtgatttgcatgttggaaataataatgttttttttttgctaatcaaggtttgattaaggaaaaggagtttggactttggacctttctactacaaatacatgtggccctttttggccaacaccaaaagttccaaaaaagaggccaaaaaataagcaacaacttttgattctctcgtaacttcccccacaaaatcagcagagcgagagcgagagcgatcggttatggcggcgacggagcatcgcggcctcagtggaggagactacaatgtcgaccttttaccaattgaccaagacgattcgccaccatcttcatggcgtctcagcctcgacacattccgtctcccttcttcttcaccgttatcatcaggacgtcacaacggccgtactcgcttgtctcgttatctccggactccgagtaagtttctcttcctcgtccttgtcttaaatctccgttcctctgtttcgtcgtctgtatgtgtattatcgatgtactgttacgtgtttacatgatccacgccagggaatgtcactctaatctgcgatttctcttcttccattgatagttttaaccctacgcgaaatctttccgcaattggtcgaagaatatacgtacggtgttcccaatatgttaaccctgtgaaaattgtagagtgatcttaccgaattttctgtttaaaagcaattaaattgattcaaaaaggaatctcagctttctgttttgcaaaattctctgtttacaacttgaagcatatatgagattctattgtgaatctgggaatattcttttggttttgctggaaacataatcatttctttatttctagtgtgatagggacacagaatcatattcttcggagttttcacgcattgtagtttgctgggaggatgataaaaaccattaaggatcgattgttaaacacgtttgaaactttgaatcattaggaataatcaggtaacaaaacttaacatgggttttactcttttctgttgtgaaaaatcagaaaaggaacgcaaagtctcagagtactacaaacagcaagagaagcttctggagggtttcaatgagatggagacaattaacgaaactggttttgtatctggagctccaactgaggtaccactcttgctctcttcatttaggcttcttctgagatctttcgtccattttcttcatatataggagcatcttgttgatttcaacaggaagaactgaagaagcttgcaaagagcgagaggcttgcagttcacatctcaaacgcagcaaaccttgtgctttttgtagcaaaagtttatgcttctgtggagagtaggtctatggctgtcattgcttccactttggactctctcttagatctcttgtctggatttattctatggtttactgctaatgccatgagaacacctaacaattttcgctatccaattggaaaacgacggatgcaacctgtggtatagtctctgtaattctctctctggttcgcttaacactcacgaaactaaaagccatattgcttaaaatttggcagggaatcattgtgtttgcatctgtgatggcaactcttggactacaagtgatactagagtcaactaggctacttgtttccaaggtacaacaccgaggaccacatttaatcttttctcgtaaactcctaacaccagttatatgatgtaatctaatctagtttgatatttctcattgtatagaatggttctcatatgagtagcaccgaggaaaaatggatgattggaataatggcttcagctacagtcgtcaagtttctgctcatgctttactgcaggagtttccagaacgaaattgtcagggcctatgcacaagatcacctctttgatgttatcaccaattcagtcggtttagcaaccgctgttttagctgtaaaattctactggtggattgatccctctggggctatactagtaagtaaatcatcatcaaccttatccattcttgaaatgtctcttgtgaagagatatattgagaaaacgtttattctttatggtttcagattgccctgtatacaatcagcacatgggcaagaacagttctagagaatgtccattcactgataggacgctcagcaccaccagatttcttggcgaaactaacgttcttgatttggaaccatcacgagaagataaaacacatagacacagtgagagcctacacgtttgggtcacactactttgtggaagttgacattgtgttgccagaggacatgaggctgcatgaagctcacaacataggagaaactcttcaggagaagctggagcaactctctgaggttgagagagcttttgtccatattgactttgagtttactcatcgtccagaacacaaatgcaaggtttgaatatcacgataggttaatggatccagaggaaataaattaagcaggatgtctcgatttctctagagtttttgttccctatgtagcattccacaaaagataataagttttaaatcccccaatacgagtgagtgacacctttagaaacgatttggtccttttatgaggtgaaaaatgtaaaatatattcaagcccacattgaagaaaaacttaagaccaagctgaaggcctaaggcatatggctcattaatgtgtactaaatatatattatcggcccgagttacggctcgttaagaaaacatagaaatgatttaggcccaacaaataatgtatgttctatattataagcccatttattattacccagctaagtcggctttgaaaagagtataggcccatttaggtgtcacgctcattagggtttattgtaacctagaatcaaagctatataagccgtcttttccacaaatccatacatcggccaagcgagctcctcaatttttcttgtttacttgtttcctcatcttttagttattgttagaggttatcttaggatcgtagcctgtgatgtttgagattgtccgtaccatctgagtttctccttgacgattacctccactttctgaggctttagatctaagatcattagttttatttttacttcggcgatgatgatgaaacaagattaccatcaaactttgagaggtttttcgctcgttgatgtaaacttctttttataatctgagcctagtttgtttgtttgaaatcttatgtgttacatgttatatgaaatcgttttggtgataggaaaggcaacaaattagagtctctgattcacttatgtcaatagtggataaagcgctgtacgttgccgagatagatatggcgatattctggtacttggactagttttgatagttccatgtgcattcaaaagcccttacatgtttctctcaacttattcccattagtatatgtattttgatttggtaaaggcaacaaattagagtctctgattcacttattcaatagtggataaagcgctgtacgttgccaataattacttggtccaaagatctcccaatcggctttcagtcttattttagccgatatgatcgatgttcctaaattatagattttgttacgtgttttcatatagctgagctgaccatatcatgctatttaccaaatctttttgatcaattacctgacacattgacagacgatcgatttttagacactgaaatatgggccgaaattttgaaggagtaatgtctggtaaagcaatgtttgataatgttatggactgctgcgcttgtagcagttagatttcattgggttataagatcgaattcaatatcccctaaaaagattgatgtaaactgtagctttgtagcagatcataaattatttcataaaacagctttcgacgggaaagtttataattttgatataggaaccggataataattgtatcagtaattcttaatcgggctttggatagtcccttcctttttagtgaattcgaatcgaaatgcaaaaataatgaggctgacgcgcttaattttctcaaatatccaaaaatggccaatttcaaaaggggttacctacagatttgtggcgcgtggtaataactcgcttatagtgcaagtggttattttgttttctaatagttaattatttaccatacaaattgtcttctaatgtgggcttactaaatactttacggccttttcgttttcaggcctagggagttaggcccattttacatctttcttgtcggtttcatttttaatgttcgtatattcgagctcttttctcgtctgtacaatgaacaaagttttactgagaacaataaagatactcaaatcattcatagggtgatcaattcgtataaacttaaattttgttcgaggattaaagtataatttataatgcctattaaggttctttgataatgctatgagcccaattttacgatcgtcgtattctatgctaccatcccattggacaagtacgatgccatattagactatttagttcaattgtctaatttaattccgaatttaaaaggccttaaataaataaatatagtaaggtttgggcgaaggttacaaatcatttcactctttcagaacacaaaatagcccaaaacatgtttcgacgagcaaacttaaaatttgtttatgaaaaccgttacgcgtataagagtaaaaaattgtcgtaactgggctagaaagagctaacgatttacagatcttaggtgcaaaattacttttcgaattccttaaactacagagataagtcgagggagagttaaaacttagaagcaccaaaaaaaaataaaaaaaaaataaaaaaacttaaaagcatcacgcgctagttgacaaaaaaaaaaaaaaaaaaaacatcacgcgcttactttttcgaactatacaaaaatagctaatttcgaaagggggttaaacctacagatttgaggtgcgtgctgataactcgcatatagtgcgcgtggttattttattttcaaacggatacaaatatcgctagtgtgggctttcttaataccggtctttttattttttgggcttaggcccagtttacacgtgtcttatcattttatttttttatgtttttctatgcattaaaaaattccttatggcaaggacaataacaaaaaaaattcattaaagatcacatagtattgtaaatgtgagattaaacatgaaaattttattttccaaaattactgctttttaatgcataagattatacttttacggtactaatgtacaaatattttccttgaaaaatcatttactaaaaataattaaataaattcgtacgtcttttctttttggtcggaattagtacgtcttttctttcttttttggtggctatttattttgttcatattagatcaaacttaggagaaatataaatatatatagatatcaaataaaaagtaagaaacataaaaatattagaagtcaaaataaagaaaagaaaaaatacaacgcgaaggtttgattaccactcaaaaaacgagcagctgtttatcttccaacaaagcttcttcgtgcatcttcgctcttctcaactcgtcatcctctccctctgattctcttaagtcgccttgaaaaattaagacaaaacaacaacaaaagaacaagagaagctctaaaatccagcagctatggcgtttcttctccccaatctctctccttctttccttcttccgaccggaaaatcactcaaagagaaacccatttccaaccaagctttatcatcatcatcatcatcgtccaatagctacgagtttgaagaagatagtctctctccactttctctctttagcgtccaggctcctcctcctgttcgaggtgcgcaggttaagaccaaaccaagtgcgcaggataagtaccagcacggcagcaaagatgacttctacatcaatctcggtttagctgtacgtacccttcgcgaagatttgcctctcctcttcaccaaagatctcaattacgacatttacaggtgtgttttcctctttctcctttaggtgattccttccttaaacctgtcaatgaaagcatttgtgtttcctctttcagggatgatataacattagtggatccaatgaacacgttctctgggattgacaactacaaattgatcttctgggcacttagatttcatggcaagattctcttcagggatatctcacttgagatcttcagggtttggcaaccatcagagaacatgattctcatcaggtggaatcttaaaggtgtacctagagtcccatgggaggcaaagggagagtttcagggtacttctcgctataaactcgaccgaaatggcaaaatctatgagcataaggtcgataacttggccttcaacttccctcaccagctcaaacctgccacttctgttttggatatggtcaccgcttgccctgcaagtcccaatccaactttcatgtttggcgccatggattcatactcatcttcttggattgagttctacaaagcagtgcaaaggacactagacaagcaagaagagcaaatgcttgtgcaagaccatttcgtcccatgctcataatgccattaggtcacactcaggtgtatatatatatactgttacattgaagatacaatacatatatctatgtgtgcaggcatatgcatatgagtagatgtggttgacttagatatcaaagagggtagggaaccaagaatactcatgagcttgtacaacttgcctattgaatgtaaacagaattccttacagttgttttgttatgtaaaacacattgatgatttgtctttacgatcaagcgaaattatatcccttgaaaccagacacaatgtatgccatgccatcataatatactaggttcaattctctcttaatctcaaagggaatatctaagtaggacaacttggcgtaatccaaagaagccatatttctatatattcagtgtgggtgatgaacaagagtgttgatgcagatttgaagtcacccatatgaagtaaaacactaaatctagaataagtagatcatttacagataagcacacacataaaaggaatcataagccagagatttttaccttttgtacggagggatgcaaagaaaaagttaatcattttggctacgctcccctgtaagattcaggtaagcaaaagctcatgaccaaacaatctcaaaacaagtttgagatgctaatgaaatctgtgatctgaacggatagagagaagatactgattgtactagtttgaaaaacagtacatgtgtataaatcataatatctctaccctgtgatgccaatagtcctcctacttaggtgcgagcaaaaatgcagtgagaccgatcaactacacatttcctttctattagcaatctaacaagttcactgctaggtagagagtctcaggcatcagatcaaatttgaaaagtgcaccaataaccatataagcaacgaacgaacaaggtaaagagaggaagaagaattgagaaagcaaaatcaagttgaacttacagtgaactactactcacttgaattagccagttgatagaaattccatgtttctaagttaaagcccaaagctgggttttgtgcctgcatcagcacttcggtttaggataatcaaatgctaaaatacacaagactgaatatggtagacaatgcaaaagatcaattctacatggcagttttcaaggagactatctttagtttatccagagaagagaataggcataattaatgagtgaattacaaatgagaaaagctttgattcactcatggaatccgtaattagagtttcgaaatcccttctctatatttacaacgctgctcacagaaataaacaacaggcgaaaattacttgcatctcaacaccattagaggaggaagagaaaccctagcttaaacttaagatttcacatagaataatttcgtcgtacctcttcctacatcatcaagtaatgcggataaactatcaattagaatcatgaagaaacttagggtttcgtggagatttttaccttctcgaagctcatcttcttcctcacatctgccttttccgctctgtttcgctttctagagagcgagaaccgagaaagaggaattgtacttgcaaacttgtgaaagctgaaatcatttgagacaactttcagtatttgaaacagagacgaattatgaccctgaatttaccgccttagtcttcacatatatagcccaagcccattacaaagcccattagatcacattttagcttaagtccaccgatgctttgttggatttagttctgtatccaacgcaaatcaagcacgactatcatcccgttcacgagaaattacagggttcaacagatatattatcccaagtacaaaatcagagagaaaccacacatatacaaccgtatttctgagtatgactatagtatagagctcaatactttcttaattcgaattattttgaagcgaatgttggtggaggaaacagaaacaaaggctcatcactgactagatcatctttaatctctgggattttgatggggacccaaatgtccgcgagtagacctaaaagtttcagacaaatgaataagaatattgccgggccaatataagagaagcccaacattttcagttcttcagaagcaatctctgatctcttaacttcttgtaaacaagaacagtgatgacagatgatgcattaacatggtgcttctttaaaacgttcaccctttttgcaactagtctctactgaaagtgagaagattataaacagtttttttgtggggattatttaaatgatgagaaagtcgtatcatatatgcccgtttgggtcaccaacctcgcgatcactgagcctttgattttaatcacggtagggtgtaaggtcgatttgaagccgctgcttcccttttgtaaccctctgcggaataaaagagtcaagatcttgccattgttaatggtgttcaaggagacagatccctgaaacaaaaatgtgaaccaaagagtaataattcatggatttaaaaggcttaccgcaatcgcaatgagctcttccaggagttcttctagatggcgcaaaggctttgacaatggaaaaacacaagaatattcacaccattgcaagaacgagatggatactttcgtaaacattgagtaggacataaaactcacccattgagttggaccatcaactggagcacttagaggatcatcatgaacctgatcataatcaagttggaacaacgaatccagaattatgtgaccaataatccaatgagcttgataaaatttctaaaacgatttggtatcaaacaaggtatatactacctccatgaaaattccatcgacgccaactgctacagctgttcttgcaatgcatggtattaactcgcgaaggcctccacttgcaacaccaccaccatccaactacatcagaatgtattgttcgtgttcaaactatttggttattgctggcttcaaaataaaataaaaagttactttttaaaaggatcataccttcttgcctgcaggttgttgtagtgaatgggttatatcagcgacctgccaataaattaaacgtgtatgttaaattgtagattgcagattgaagaacataaagcagaataagcaacatgaaaaagaaaaaaaaggatggagcaagatacatacaacaggacaattagcttctctcatccactcgaagtttcgtggatctactatcaaatcatctgataatcaaaaccaaaaagagtatcagtcagtcaattgtaaaggcagagaaaaaaaattgttttagcaccctctaatgtatacttcagcaatccaattttttttaattccaagagatttgcatgagatttgagaatatctacaatactaaattccgtggacacaatatttgaaaaggagatgataacttactgtatccgaacatggttcctctttcacaaaccataacatttggattcccagccagtctgatcttctcagctgaattctccatgaccttagcatatatataaccagtcatcaaaagtattccagccaaatattttgaccagcttgaaaacgcaggaagaaagaactcacagaaggagcacagaattgtcctttcttaatattgataatttttccggtttgtgctgctgcaaccagaagatctgtctgtggaattacaattaacaacttaaatcatcaaccatagaacagatatcaatccaagatcgacagtttgaaagctacaatcaaaagctttgaggaaaatacagtttagagtctcacctggcgacataagaatgctggaatctgaattatatctgcaaccttgccaactgcttcacactaaggaaaataaaatcacacattagaaggtactaaagacttgctaaatctcaatcttttatgtgattacgttcatttatacctggcttgattcatgaacatcagttactattggtagatcatatgctaccttcaccttctcaagaatctgcgttggagaaccagaaatgtgaccatcattattcttgttcagaaaaaaaaaaaattaaagcaatttcacgttcaagtatatggtagcatcataggggagagtaatgcaatggctgctatcaattagtttacatatataagatcgatcaatactctgtgaaggttctcatatccacagtcctaacatccaattcatctatatttagacatcccaaggcataaaaagagtgattaaaggtatacaggggaagataccttcagaccctcggccatgccaggaccacgaaatgactttgaagaagttctgttagctttatcaaaacttgacttgaaaaccaggggcagcccaactctacaccattcacacacacagacacaacaaaagtagcatgaggatcttgaaaaaagaaaacacattgttcaaagttcatctctcagttgagttctctactgtaatcaattttcatatagagatcaatacacattcatacaaagatctctcagggggaaaaacggagtacaagaaatcatactttgtggaaatgtctttaatgtgctttgccattcgaagaatatgttcctcggattcaatcacatttggaccagccaacaagaagaatggttcagcagcctatacacgatatacgtattagaatcaaactcgattttaccgtaagaagccaacattcaacattctgaaaacaaaaaggcgagactcaaaccttgagctgattgtacaatagtgatgttgccgccattcttatcgccaagccaataatcgcaaaagaaaatcagaatcagaatccgaagatcgggaaaacctaattcttctctgcaacgaagcaaataagaaatggagaattaaggaatctgacctttaacttgatctcgaagttgctgcagagtgagtgaagaaggcaagtgagatctcctctcacctttagcgcgtcgtgtaaattggagatattaactgagaggtgatgtttggatacatggacagattaattcctatccaggataagaacgtaggaatactcgggacagattaattcctatccaggataaggacgtaagctttactcggagacattaaagacgtaatcgaacaaaaatgaactaacaatgatttaaagacgtaaatatcatttccattatattttcagacaagtattaacaatgagagatctgaaacagagaacccgcctacaaaaacccatgacttttgtctcccctgttagaacgctttcgatgacatgagtggtttgggaggtgacatagatctaagctcaggagccgagcttgggaacatcacgttcatcttatgcatcaatatatcagaccgtgatgggatctcgttcagaagaaactgttgcacgatcggtttcttgaaccactccatcaccaactctcctggtgccctcaagacgactttgctgacttcaaaaggcgactcaacagagctcagcatttgagcaattacaatcttcaatgtcggtcctgtgactagctttatacgtctcgggactactccgtagtaaagcattcgttttctgaacctgtggagagtgtgaaccacggctatgagcgcagctccgacagataagtttctcacatcgagagaccaagcaatgtgttgatcaaagacgatggcttttggaaagagtttgttctcgtacgctactttccagacacatcgagctcggtttatttgacccatcaagacaaggtagttgagaaggacattcacaaagtacctagcagctccttcttcgagttcgtaatcaatcccttggtaaaactctctgacaaacgttagaactggttgtttcctctgttctggacctgtgaagagaccacacataaaggcatgagctttatgcttggtagcgctgaggattgacatcaattgtctctctttatcttcgtcttggcatctgacaagatgggcgagaatcgaagtgtaaagcaccaagtcaacttttccagcagaatgcacgagtgtctccagcaaaggcctagctgaatcgtatagaccatttttcatgcatgattcaaataactgcctgatgataaaattgtttgttttgatccctgaagaacccatgaacctaagccatttcagagcaagatccacagaagcatctttgatatatatcatcaaaacatcgctagcgcagacatctacggaataccccattgctttcatctcgagtagtatcttcccagcaacatcgacaagtcttttgttggccagaagtgtaagaagagaaatataactgctcaggccaggccttaacccagcattagtcatggagttatagattttcattgcagagtctacttgcccagatccagcatgcatctccaatagacacgaatatgtggatggtgtcggtaaaaacccagctttctccatgtctttgaaaaccgtcattgctacttcaagctttcctgattttgcatgagattcaatgatcattgtgtacaatccaaagtttggcctgaaacctgacttcttcatctcatcccaaagcctaagagcagtatccagcttaccagctttagcatatgaatcaatcaaggaaacaaacatagttgctgatggcctatggccaaatccctgcatttccatgtaaaccttcattgatgtgtccaatcgaccagctttccccattgaatcaacaagcgaagaaaacacactaaagcttggtcggagtttcctttctttcatttgctgaaaaagcttgaaagctgcatcaagacggccggatttggccaagcttggaattatcagctcataagttgacccatccaacaaactatcagttttctccatgctctcataaatctcaaatgccttatacgggagacctttgttcagaaacaacatcattagattattatatgtctgcgtatcaattttgcatcccgactcttgagcctttttgaaacaacaaaaagcaacctccagtttctcagctttagccaaatactgaatcacttggttataggcgttaaacgacaaatcaccgtgactactcgagtcttgaaccatctcctcaaacaacgactgaatcccaacaaaatcccttccctggttcaacccatcaaacaacacgacataacattcatccgaaggcagataccaaggctgcttcttagcccacctaaacagactcagcgccgcatcaacctctttaacaatcttcaaagactgcgtaatatgaaccatattcggaacaaactggagtttatctaactgagtctccaactccggtccccatttccacctctgaacaacttcaacaatctttgcaacagaagaagcattcatgtaaggcttcttcaatccaccaaccattacatggtcatcaagccctggctctactgatcttattcccttaccactgtgtagtacactacccgactcatctaaatactcaacctcctctgtccagccactagattcactacttccaatcttttcactacaaaacctcctgacaatactccgacattgtgtagtcaatccaacaaaattagggtctctcggtacagaacaatcgggacaaaagccatttctaacagtgaaatagctcaataatcggatgttgaacgagaaactaccggctaatttagggtttattcgactcggagaaatcaatggagactcagaaatggaactcctactaagcgtaaaaatgacatttctgggaattactttcgcggttcttccacggatcatcgaagatgtagacggaattattgggtcatgtaatgcgaagaattgaaatttgaggaatcaattctaacctggactccagagatggcgatttttccgtctcctccgtcggcttaaaccctaaaaccagaggctttagaacagtgtggggttttcccaaaatagattattttttttgaatttcatgttaaattagattcaaaagaaaacgtttttacaacaagtgcagctttaatttagattacaatagtagagaaaaatcattaccaattagcaaaaaatcattttaacgttagagaaaaaataaccaattaaccacacacacatcaaaaacaaaaaacaaaaaaaaattaactcatcaatttagtacaaatttctttaaatgttttgctcatcaactatcaattatcttctacaaaggaaaataaaataaaatcgaaattcatgtattttacttaaaattttagttattttatatgaaaaaaaaatcatataaacacaaaattttgaatctgaatttgattatagagtctagactatggtggatacatggatacaataacactaactcatcactcttataactagtttcctagttacctaatgttaaactgaaaatattttgatatatggtagcaattaaatatttgaattttcccaataatgtctttggttttgtacattcttttaatttttgtagatcaaggatttacttggatgaattgctataaaataaaagcaattaaatagtgaaaaactcatcagttggtttgtaattatattatttgcaagccttttagtctgtagaaaagagcatctaaagagaatatgtgaagcttatgcaaatggatgtagtcaagaaaaagataaatgtaaaagagctttgtttgagtacaaagcaagcaaaagtttatttataaacagctttcctctctgattgtttttgcagtgtcaagcaagcatatatgcccattgccatacatatatgtatattcttctactatcaacataagttagacagatcaaaattggttaaatatggtaaaaatttgcacattgtctccagtaaagtgatcttctgtgacaacgaaagtatgcaactaaagtgcgaatctttatgagaaacagaaccttatatccttccacaggttaccttgcaaggattctttgaggtttttgttttggtttgtacacatgcacatgacacacacacacatacgcgatatatataaagaacgagagagcgaagagacaaatatttaacctatcttggtcctgtttctttgtcttcttactcttgagagtgtatagctaattggttttatttctcttttggtattcatcttaaaaccatggaatcatatcgagtcttcacaactatttgtcttcttctttgtctctttctctcagccaacttcttcactcattatggtaaaatcatctctgtctctttctttctttctctctatccaactctatctctaaaagcatttgatattgattatgattttcttatatagtagtagatgcaagaaaaagcgtgggatttgagagagagccaaagaaggtgatgatgatcaaagcattaaagcacacatcattgttacagaaaatgatgacacagctcaatcttgctcagcctttagactactcttcatcctccaacactcaaccttatggcgttagcacaactctcactctacctccttatgtttcacttcccccactttcagttcccggaaatgcccctcctttttgcattaatcccccaaatactcctccttcctcctcttatcctggtcttagcccacctcccggcccaatcacattacctaacccacccgactcctcctctaacccgaactccaaccccaacccacccgaatcatcctctaacccgaacccacctgattcatcctctaatccaaactcaaacccaaacccacccgttaccgtccctaatccacccgaatcatcctctaacccaaacccacctgattcatcctctaatccaaactcaaacccaaacccacccgaatcatcctctaacccaaacccacccgttaccgtccctaacccacccgaatcatcctctaacccaaacccaccagagtcatcctctaatccaaacccacccattaccattccatacccgcctgaatcctccagcccaaacccgccagaaatagttcctagccctccagaatctggttatacaccagggcccgttttaggcccaccttactctgaaccgggcccatcaacacctaccggatcaattccaagtccatcatcggggtttcttcccccaatcgtttatccgccacccatggcaccaccgtcaccgagcgtaactccgacgtcggcttactggtgcgtagctaagccctcggtccctgacccaattattcaagaagccatgaactttgcatgtgggtcaggagctgattgtcattcaattcagcctaacgggccttgctttaagcctaatacattgtgggcccatgcttcgttcgcctacaatagctattggcaacggaccaaaagtacgggtggctcgtgcacgttcggcggcactggcatgcttgtcaccgttgatccaagtaagagaaatatttgtttatcaactattatttattggtaatattcatttttttaaacaatgttattgaatggcaaacaggctttaacgggtgccattttgatttcttctgatgcatgaagacgaagacagctctcactttacattttgttggatacgaataatatcaaagaaatctagatataatatgtttaggtgggtcgctcacttgtaagttgaaaccaattaaagcttatttcttgggaatggcataattataaatcttatgctaaatacgtatattgcttttgctaatggaattaggtcttctagacttgtggtacgttgcatctacttaactactatcactaataattcctttatttatacacacatcccttttctcccacaatgatttagtagctttgaaataaagtaatatacgcattctcagtttctcaccacgacatctttttttatttatagaaaaacttctacgccggtctattatctcaaacacgtgaaatgtcaccctgctaggttttgctgttgattagcgttgttcactaattttgtactaggtattcaaaagaatcgcaactgcagatttaagtgagtatatatgaaagagtctcaacaatgtaagtgaaacagtttacgtaggaacaatgtaacttgatgtaccttattctgttatacgaaaaacattcgtacaatagaaattaatcgttacaaatgtgggttaattctaccgtgtgcagatattgcgtgagtactttaatcacttgaatattttggttcatgcattttgttcatggtgaactagcaaaaaattagttgctataaaacaatatggcctttttagtaaccaagtaattactggtctagtggcgttttgaagacatatgaactgtggtttcgaactctgtgggtgaaaaaaaaaaaaaaaattttgtattgatcagaaaaattcggcaaaatccagagacctaatgttaaatggatacaaaagaaaaaaatgaatataatgttcgttcagcatttttgttttgtattgtattctgtacctatggaaaattagtttttaaaccagaatggaacaaaaaaatcgaatatatgaaaaagtggtaaactcaaaatcggcaaaaaaataaaaacagaaaaaaggtgagaaaataggaaaaaggtaaaaaagtaaaaaaaaaaaaaaaaggaagaacccttccgatttgatttgattgggactatataaagggaactctataacatcatctctctcacaagtcgcaacgctccaacgacttcaattcaatttactttcgattttgtcctcttccaaaaacccttccgcttaaaccctaattcacttcgccggccatgtcgacactcgaggatggatttccggcggataagctcttcgctcaaggatactcttacacctacgacgacgtcatctttcttcctcacttcatcgatttctccacagacgctgtttctctatccacgcgccttagccggcgcgtgcctctctccataccttgcgtttcgtctccgatggatactgtttcggaatctcacatggctgctgctatggcttctcttggtgggattggaatcgtccactataactgtggcatcgccgctcaagcatcgattattcgccaagctaagtcgcttaaacatccgattgcttccgacgccggtgtgaagttcccggagtatgagattacttctttagatgcttttggtccttcttccttcgtttttgtcgagcaaacaggtgagtgaatcatattcgtttttttttgcaaaaagaatctgaatttaatagttacaatggtgaatttaagtttgtttgttgtattgatttaaatgcaggaacaatgacgactcctaaattgttaggctatgtaacgaaatcgcagtggaagagaatgaattacgaacaaagggagatgaagatatacgattacatgaagagctgtgatagcagtgactattgtgtaccatgggaaattgattttgaaaagttggagtttgttttagaagataagcaaaagggctttgtggttcttgagagggatggtgagactgtgaacgtggtgacgaaagatgatatacagagggttaaaggatatcccaagtctggaccagggactgtgggcccagacggtgagtggatggttggtgcagcgataggtacgagggagtctgataaggagaggcttgagcatttggttaatgttggggtcaatgctgtagtgttggatagttcgcaagggaactctatttaccagcttgagatgatcaagtatgtgaaaaagacttaccctgaattggatgtgattggtggcaatgttgtgacaatgtaccaggcacagaatttgatccaagcaggagttgatgggttgagagttggtatgggatctggttcgatatgtaccacacaagaggtttgtgcagttggtcgtggacaggtaaattaaaaagctctgaatcctaactgtttaatcttttaaaaggtgtaaactttgtgactatatgtgactaaacagatttgtctttttgtgtgatttggacctgttaggctactgctgtgtacaaggtttgttcgatcgctgctcagagcgggattccagttatagcggatggtggtatctcaaattcagggcacattgtaaaggctctcgtccttggagcatcaactgttatgatgggtagctttttagctggaagtactgaggctcccgggggttacgagtatacggtatagtcacatcttctttcggtttaatttacagttttcttgaaactctgtttgttttgatcgttttgtggtaataacagaacggtaagaggatcaagaagtaccgtggaatgggatcgctagaagcaatgactaaaggaagtgaccaaagatacttaggagatcaaacaaaactcaagattgctcaaggagtggttggagcagtcgcggataaaggctcagtgttgaagctgataccttacacaatgcacgccgtgaaacaaggtttccaagaccttggtgcttcttccttgcaatctgctcatggtctgttgagatcaaacatccttaggcttgaggtgaatgaaacttgttgtctcaattctaattcccaaaaactctctaattttgctgagattagtgctaatactgtttggtttttgtgacaggctcgaactggtgctgcacaggtcgaaggaggagttcacgggctggtttcttatgaaaagaaatcgttttaagctttggcctaaaattgagtgctaagagtgtttcttatatcatgttccatgttatttttatagatattacttttcaatctagtaactttagtctttttatttattgacatgatttacattgtctcctaaaatcaattttcctctaatattgtcttatatctactaagttactagaagatttgttgaaattttgaaaagaactcaatataaatgaatgaaaagaaacagcctttgtttttctaaattaaacaaacctcttcttgttctgaagcaacaaagaagaagaccaaagtcttattttcatttactgagtttacctgccagatcaacttggatcaagttaaagattcttcctgtaagctaacaggctcgtagatcactgatttaacaagactcatcagatcatttgatgtgaatccatcgtccttcctgtaaaataagttcaacactttgctcattttcaagaacgcttctttgcattcccttggaaccacacttcctttctcctccaaaactagcttatgcaattcttccctctttctctctgctaaacctttcatcgattctatgatcacttctttgctgcgattgtctctctcgtgtttcatgtgcaatgaaaccgcattcagcttcccttccgcgctttctctctgcaaaaaaacatcaaaagggatatataatcccaaatctatgagcagaggtttgttaattaccattattttgttggatttaggcgtctttgcccatctttcaactgtacagtttagtaaaaagtttgagattttaagaagagtcttaccttaaaaccttgtatgtcatttagaagacgacccatagtgctcacgagcttgtagagctgattatattggtggctatcgactgtcttctctggaagtggaggtccgatcagataggtagctgggaggacaattggtcctaatgcaaatgatatgtacgcattttccatgtaatcctccaagcttggtgttgacttgtcactggaccactcggcttctctcaacatagacttgagcagatccaaccactgcgtaagatatagcaccaatgaagtatggtcagatgagttgttaggctatgataacagagaatataattgtgtgggatgattgatacttaacaattttcacaatgtggtgtgtcacattgcgtccttgataggtgaatgctttgtctcctgtttcgagaatggtgtcccttagaactgagaatatgatctcaacatgttctgagctgtactcaggaacaccgttcaaatcccacctgaaatttgtaagcgaagaacgattatgcttttacgagggaacaagcagaggaagagctcagaagaaggagccaaatcaacatacttttcgaccaagtgtatgaggttttccagttcttctttggaccctccaacatcaaagaagtcgtctacaaccgttgtaagtactccacctttggcccacgatatacgagcatcagatagttcaggagaaaataaagttgcagccccagagaaataacagtaagccagcttctgtctggcaaatttcagttcctgcaatctattctccacaatccacctgcaagttggtgagcagcattgctgaattgtgactacataacaaatagaagtcacacctgaatttataacgtgaactcgttcaagtgtgtggttatatattagtaaaactaattagcttatgcaagaaggctgaataaatgaaaaagcttagctgggagcgcacctatcaagacgttccatttcttcacggtgtatggactggcagaaattgaagtcatccacagctaacttcaggatatcagaggtgcaaatattgtgcaaactagaacacagaagaaaacaagaatgagaatgaatgccctgattagattgtcgtttaatggaagctggctgtgccaaaacatatggcaacacaggctagaaaggaaagaagaggaatttaccgatatgaggtttttgtaactctggtgttttccacagcagaaccattgagtatttttctcctgtgatctgatctttctaggcttgcataggagggaaaagcaagagcatcctcgacctgaaaaagcttcgattctcagatagctctcacaggaggatagataagcaaaagagattacctctttcttgaggtatttatctcgaacagaggtcttaacccagctggacaattccatctccagatattgtttagtccaacaacactgcttcttcaaagctgattcatgtggataactttgagcagccttaaataattctaacacagaaaacgtattcttaacatatccttccaaagtatcagagaaaccagattcttctgcaaatggttttagcggatctgcaacaaatacagcgtctcaacttaacatggacatgcatttaactcaaatctaggctataattatctgaaataaagaggtcacttcaccgtaagacacatcatagccatgagcaagcaataatcgaaaagccaaagcacaagtggccaagtccaaacatatttcttcatccccacgaagccaatatctgttcattggtcaatgatggtttacaagttaaactacaaaatcatcataacaagtttccatatttgatgaaggcatttacctataggtttcatccaatatgcttttgatttcggttttgaaatctctatcaattcctaagctttcaagagtgacaattatactaaggcgtgcatattgatcaaatggataaactgaaggaactgaaaagataagcaaacttattagcagcggaactctctacatacaaaggaaatgatagtcatgttgaaagatatacctgcagcctcgaatttctgaaggagagaacagagataacggagacaaccatcattcccaaactgagtaaaagcagctgctgttgtggctggagaatcaaacagtgacccatttttcctttgatatttgactatcaaatcccaatcttttaggtttcttgtcccctctaaaacataggccagatatgcttctcttccctttgaaaacttttcactatcactgatcaaatattaaatcaacaaaaagttatgaaaacgaagacttctgtacaagaccatctttcagtttcgtctgagtatgctaataaaagagcaggagtataccatttaagatccagatctctttttcgtatcatgtcatccaccacttctgagcccaatggaatcgtcagattcaaatctctagcatatttaatcatcccaggaaatataatatcaaaccctgttggtttctgtatggtttcatcagtgactaatgcagaattcagctcaataaactggagacctggatttttatttgacactcatcaatccatgaatcttccaaaagtgaaacagtaacaaaagagaaagtaaaaaaccgacccttgtttatttgtctttcaccaattccccacttctttaacgcgaggatactagccagtgtagatgataacacatccttcttaagagattgatggtcatggttatcaagtccccaagatccatcttcatgttgattatccaataaccatttcacacactgtgggaaaagtggagcattttgggagctcggtgatggaaccattgctacccaactagtatcgtaggccgaaacagaaagctccactttctccaacatcttcctaatcttctcctttgtttgctcaaagctctggatagtttaagagtattagttggtctagaccagaatttttctcttatgtaaaagcaagcaaaaatcagctgttttgtttatttaccacattgttagctcttgtctgtacttctgagtccaatctccgttccaaagtagctgcataacaagagaacattgccatttgattcaggtaagagagtgtagcaacaattatttacttcattgatatcagtcctaaatcctcactaaaggaagattatgtaagaaaatcaatttcaattgaactgacgaaataagcatttcgtataatccaaaagatcaaatcagacaacaattcgcagagtagggtaaaaatacagaataatgccagtttacttcaattccatttaatcaccaagtacatgcaagcgaagaaatcaaccaatgccggaaatgaaaaaagagagatatcgagagtgagagtacagtaacctgagatcggagacgaacaaccggaggagcgaaggttgatagacataaagaaaccagaagcaaccgaaacggcgtcgtagcaacctggtgagatgtcatcatcatcaacagtgacagtgagagtcaattccagattgtgaaacgaaaacaataaaatcaaaaatgaaagcgacagagagagaaatatacatactcgcgacgaattagccttgacgactgacgacgaccgtaggacccgaaaatatctggaaatctggcttaataaatagtagattattacaagtcattaccatacaaataaatcttttttgaccaattacattacgacaaaggataatcaaaatcaggaaataacgtgtacatgtgtatatcaaccgaacaggtggaccgtagatatcgactcaacaaaaaactacttttatgagattattacaagaactgaagaacatatgattaaatctaaagactgaacaaaattctctgcttattttgcaatttccaactgtaattcatttacattattttctaaacaccatttactggctagtatcttaacaacaacaggacaaaacacaaacgtttgttttcaacaatatcaaaattataaacgaactatatacttattttcgttttttctcttttgttagctaagccaaaactacgccgtttgacgatggagggatcaacgcctgatgctcgaagggctctattactgtaaacctccagcacttctgttccacgaaaggtacgaggggtctccgagttgcctgaaaccattaatacagaagatcatttcactgtacacgttccaaaatctgaaaagtgtaataatgtcttaacaaaatgaagcatgcatgaccctgagagtgacgtaccttggcttaactagatacaatacggcaaatgtaacagccaagaacaagcaaatactgcctacagtcagataagcaatcccgaggaaatcattccttccgccgagccagctagttgttgacagcactagcttcttctgcccattgaagctgtaagtgttgtagttgttctgcaacaagaccgttatggtatcacccgcgtgtaggtctgtctcaatcttcccatacagcttcctaaacgttggcaaagccgcggttcgcatccagactatgaggtcttcttgctcactcaactatccaacagacaactcttacacttgttaaaatcctatcagaagaaggaatctaaattgatcgatattcaaggattttttaccggtttagaaatattaagagttccaccgcctattggtgctcctttctgaaaatttttagggaagacatttttcccaaacttgttttctctgtcactcttccatgagatacctttcttattcacaagaagttgttggctatttcttgaaaagctataagtatcgttgaacaaactccaagcaacaagaccacatggcacaattggttctccacccacattatcctcaggtgcacaggtcttcacatcatgctcttcttttggacttcttagttgtgcatcgtttcgacttttcacatacctaatcatatacaatcaaccagaggagtaactgtattaatgcagggaaagtaacaggcaaaagcgataactattactaagcagataaggcaaagtaccgtctatggttttggtagaaattctcaagttggtagtatacatagacaggatgcttcatagcttttgtcacctgaaaaaaatgaaaggctttagaaagagccatacctagaagaacagctaatatacacaatcatagaaggaactaaattgccatagaagaagacatgtaccgttattgttctcttacagatcttatctccttcaccctgtatgtaagcgaccatgttgtttctagaagatgttggaatacagtctgtgtcatatcgatcaacaatctcgactaccttcaagtatgaatgaaacatatcctcaataaaaccacaaaaccgaagctggaaaataaaccattagaaaaggcagaaaaacaatagcatgatgcacatactccctgagaagcaaataagcagatcactccaaggggaatgaagacaaccccagcgacaagaaatgtcaagatcacctgcaaatggccatgaacaataagaaaacagcaaaaagagtaagagtcatccttttccactattgtaacattgaacttacccatcttggagtaagaattggcttgcacgctggaagctcttgctgagtaaacctagaatctggtaaagaaaattggttccttgtgaagttaagaacagagaatccaaagcaaccatacagtttgtttaatgggagaacaatgtttaaagttttcgaacaaaagatttcaaccaatgtcacatcaaaacccaacaactaaacgtgagtttcaactacacggtgtaggacaacttgaaaaaccaagctgatgaacctatacacctcttgtatatacgaatctacatcaaacccagagtatacaagaatgctattagaaatcaaagaaacatgcaaaaacacatggtgatcgaggtatagcaacaccatcaacagagaaatttttgtcaattcaatacgaattccaggaaagaaagaaaaaaagaagacgaaatttctaaggacgatccatgactatacaaaaagttcgaccaaatcagaagattagaaggatagatagagatagaaagatcacattttggtcgcttggaggtttttttgacaccggaaatctcagacgatccgcctcctccgacggtggaagatgccgcggtggaactcatcaccgaagaaattgattagaaatgaaatctcctctacaactatattccgaatcgaatggacggcatgagtcgttttgggaagaacagatcctacgcgaatgaggggaagaatgttaggttaggcttatgaaacatatctacttggggaagatgtatagatcttttagatgaagaagcaaaactctcgacaaggaaaaaagaaagacgactttgacaaatgctgttatcatgggagggaaaaataaaataataataagccaatttttatgttattttttaaagggcaatttgggtaaagaataaaaaacggaagttttcgaacaaacccggcaaatgcggttaaactgccacgtggattacacgtcattaataattaacccactcgaatacagtcaaataacccacctgtcatttttgacggatccaattttgaagatattttacttgtaaaaaatctcttgacaacatataatttcgttgcctagtagcttcttcacagcttctgatctcactagtgttcgtcatctttgttcgattgaagtttgggaagtggtgatggtaataggagcagcagcgcgtgtagccatcggcggttgtcgaaagctcatctcgtcacatacctccctcctcctcgtctcttctcagtgtcgccaggtaaatcgtctgtcttctcaatcgattcttctgtatttacatatttactcgtggattcgtccgcagtctctcacggagaaaaggatcgagtggtttcaaaatcagaacaatggttatatatctgaattcagtttttctagtatttctcggatcttgtggtctcatggaggaaaagtgaattgggtttcctccggatgtttttgttaaagaacaaatgtgaatacgttatgataatgatactctgttaattcaattgattatcagatgagtatggacgcacaaagcgtttctgaaaagcttaggagttctggtctattacgaactcaaggtctaattggaggcaagtggcttgactcgtatgacaataagacaatcaaggtcatacaactctgccttttaccctctctctttgttttggggatgttattttggaatgctttatgttgacatcatgttttcttcctgacaggttaacaatccagcaaccggtgaaattatagctgatgttgcatgtatgggaacaaaagagacaaatgatgctattgcttcttcttatgaagcatttacttgtatgcttctcttcttcattactttagcttctttcttttcgagcttcttaattctaccttaaactgttccgtctctcctgctcaatgtttgatggtcacttctattcacgctgaacattttgctctaatgctcttacatgttatcacattcagcttggagcagattgactgctggagagaggagtaaagttttacggagatggtacaatcttttatcccgtagcaatgcgttctcttttacttttgtagtgttggatggggatgtttaggattataaggttctgagccacttcatttcaccaaacacaggtatgacctcctgattgcacacaaggaagaacttggacaacttataactttggagcaaggaaaaccactcaaggaagccatcggagaggttaatgattcattttttatttgagaacattgaatgtgctgtttaggcttgtctcaactgttgcaatcgtttcttaaatgcaatatatgattctgcaatttagtttacaggtagcatatggggcaagttttattgagtactatgcggaggaggcaaaacgtgtatatggtgatataattcctccgaatctgtctgatcgccgactgttggttctaaaacaggtttccccattcatgcttctatatttaatacatgcagcttttttgtagtgacatagttctgcaccctaagcttaacttgtaggtgcgtagttaaataattgccaggctatctgggcttggaaacctgtgacttggctctgcattcccacaccttcccaagaatttttttttgcaattttctaagtcttgtagcaatgtgatatgaacttggagaaccttaaccttgctttgcgaattccattttatatgtggatattcctcgtgtacttttttttccatgcaatgtggctgtatttgtaatcgcaagtgtttactatacatctcaattgcttgactctcttgattttctttgcagcctgtcggtgttgttggtgcaattaccccttggaacttccccttagccatgattactcggaaggtcttgctttttttaccattccaatttaccttcttctttctgtaaatagctgcctagtacccagtgagtatgtagaacttttttcattaaatttgatgtagatggtaaatggtattgtaggtcggccctgctcttgcttctggatgcacggtggttgttaaaccatctgaacttacgcccctaacagcacttgctgcggctgaacttgcacttcaagctggagttcctccggtaatcttttatattaggcttgaactatacaaccaactagcgtctctggtcacatctagatggatttcctcatgtcagggaaataaccaataatgtgttaagttcgaacacagtagtctttccgttttacatgtaatctgatttgaatatttgatcagcccatctccaagagtttgtattgtcgtcaatgtggctactatctgatgtatggacccattgatgtaggattaagtggtttaaaggctagttttttacgaagtttcttttgtgctaatgaactctttgggcagaccatctctttagggttttgctcttttttttttttttttttttttgtatttgtaacacttcatgtttcatttgcattattattttcaatagggggcacttaatgtggtcatgggaaatgctcctgaaattggggatgctttgcttacgagtccacaggtttctctaatcatatttgtgtacattctgttatttgtatctatgccactagtagtgaattttgataagtatccttattaattgactgcttttgtttctcgtgctactcaggtgagaaaaatcacgttcacgggatcaacagcagttgggaagaagttgatggcagctgctgcacctaccgtcaagaaggtatacttaagcaacgatatcatgctatttaaaataatattctctagaatctagattgaataccccctggtacctcttcttttttattggtgtaggtttctctagaacttggcggcaacgcaccctctatagtatttgatgatgcagacctggatgtagctgtaaaaggaacggtaagtaatagtcataaggttgaaggcatttctttatccaaaagatgcaaaaacgttgattcatctggaattactcagaactgacagtatcccgtctcttttccatactagatgtgtatatagttttactgcttatatagatacttatgtccatgatccacctatcccagctcttagtttcaagctcaattttcttagtggtgcactatgggatcttcaataccctaaaacattatattacccatttgatctgtgattgcagcttgcagcgaaatttaggaatagtggtcagacatgtgtttgtgcgaacagagtacttgtgcaagatggtaagaattgggatactcggcacacccctcaggatcttgcatccagtgttaatataattatattttttccgcaggtatctatgataaatttgctgaggccttttctgaagcggttcaaaaattagaagtaggagatgggtttagggatgggacaacccaggtatgtcctttttcgatcttatgcttctgctttgtgatgttatacccttgatgattgagggggttacaagaaatatgagaatttcacgttcatgtaccttatttctacgttctgtcgagtagcatcccaagcgatttgattttaaaattaactgagtctcttgtgtgctctactattttgctgttaatctatttgtcgcttcaaaattcttacagggtccacttataaatgatgcagcagtgcaaaaggtacattctattaataatactttgcagattccgtttttcatgcacaacaataatgtttgatgacagaatgtttatagtcttcatgcttgataatttcaggtagagacatttgtacaagatgctgtttctaaggtttgtattttaccttatgcatccttgctaatccttgatttctaagcaatgcagttcatatattctatttgtattcagccaaaaacaattcttgtattgccaatactaacacaagtactctgttcaagtaaaatcttatttattggtgtcttctttttaaagggagcaaaaatcatcattggtggcaaaaggcacagtctagggatgactttctatgagcctactgttatccgcgatgtttcggataacatgatcatgtctaagtaagtactgaaaaatttcacataattgcagtgttacagcttcttgtatctctaaagaacgagttatagaaacatagtgttcctcgcatttttgtgatcagaagaactaatttactttttctagggaggagatttttggacctgtagctccccttattcggttcaaaaccgaggaggacgctatcagaattgctaatgacacaattgcaggtttgtcctcatttaatcttggtaacctttttcttttacttgtcgagtcttaggctaacataataagtggaaatgtgtcttgtgtgtgtatgtgtgtgcaggacttgctgcttatatattcacaaacagtgtccaaagatcttggcgtgtatttgaagcacttgaatatggacttgtaggggtgaacgaaggactcatatcaacagaggtaagaccagggatgaaagaaccacgttctcctaattatagccatacatatgcttacatcttttgattgcaggtggctccattcgggggagtgaagcagtctggtcttggaagggaaggatccaagtatggtatggacgaataccttgaggtaactcacaacactcatttctctcttattgaactcgcttcagttgataggtcttatataatattagaaatctacgtaataaagtctgcaaggttatagccttataggtggttagttttacattttcctgtcatgcgattgctcccaaactccaactataacacagagactatcgatgcgaatctgtcttttgaattgtttataagcataaagttttgcaaattactacttttcatttattgattctgggctcttggctttgacgcagatcaaatacgtatgcttgggagatatgaatagacactgatttggtttgtttgaaaagctttagaaattgtaagtttttctcctccactcgtatccttctaataaaagcttactgtggaacataataaggattcggaggatacttcttaagaaataaagatttggtctacgaccaattgttagcatgatttttaagtaataatttggggtttccattttatttatctttgtttacgttatttttttctttgttttacgttaatttttgtaattcggacaatttttgctttggatatacccaaaaaaataaaaaaataaacgttgttgttctttgcttcatttatcagcaatttttagaaatcgattgggtttatttttcttttttcatcagtatcttgtcattactatttataaacgctttatgtctcatgtgacaatgttttggaggattatgacttattaacagtcgatcgatttatcgaatttagtgttatatattaaaatattaattattcaaaaaaattggatcagttatgtttcaaaatagcgttagattacatggctctatgccaaagttgggattttatttttgtttgtagtttttttaagtggggaaaagataagaaggttagaaggaatatattcatttcggagaagaaatcccaaagcaccatcacaaaaagatgcttgaagttcaagcaactgtggcctctatttttttataagccgacttactttattgtcactaatttcatttctttctttctttaagctcttagtttgcttcaacaacaattagctaaaagttaaacattagctttacttggtttaactaaaaacaaaaactttggtttctttttttcaaagcaaaatacaatttagcttaaaatcattattgaaaacattaataaagaaagatgagaacttaaatgattttagggcggatgatttgctaatgctaatatgcatcatatcactatgaatcaattttgtagataatagtgatgatgattgtgaaaacacaaatatcgtgataatataagtaggaataatatatgtgtgtatctatactcaaaaagtggtaagaaaaaataaaaagtctagtaaactatgtaaatgtggctggccaagtttatacggttggcatctatcgcgggagttgtattttcattttttaatattgttggcgcaataagaatctatctttattcatcaaagaggagaagaatcgattccaattctcatgcaatttgaactttgatttaatatttaaattcaaaagttataaccattttcttattttatcttggtcagaattgtgtgcggtaattgattaatttaatttattgtacaaataattcgtttcacagccaagatttttaacatttctggcaaagaaaaacactgtttttttatttattccaagaaattaatatctgaaaaatgtgttaccatgtatagctgcacaatcgtcagtcctacaaaagccaaaaaaggttatagccccagcaagctttaaccaataaattaaaatggagaaaagaagaaaaacatatggtaaaaataaaaagaataaaagagctttaataagtagaagaagaggtccccaacgttaactctatctttacacattgatgcataattctccacatattaatagtccgtgtttataatatgtataactttaaaaaattgttccatattcttatgttaatttttttgttttaattcaatattcattgactggtattggtctacattttaacatgtacatgctttcccttaattaatacttaatatataacctctaataaatttctgattcaattcaaattttattcttagataatattctctcttttttgtgtgtgcatatcagcctcagccatattcattgacttattcttgttctatgtaaatatgctatgggacctcccactcatatatatttaggttgaccatttattttacatgcatgcaattgaatttaggggttaatctaaatcgttgcgtatatgaattatatatgattttagtttgtatattgaaaaatgcatcgtcgttctatacataagctagtttagtagctaatagggcaatattaacaaagttgattttctggtttgtagtgtccatacaagtaatttagttaattatctcgtttgttcacctttttgtttcttttttcttttgctagctagttaattgcggatgtaaactacatcttttactaatcgatgaatggaaaacgtttttgtcgtagacaaatattccaccgtacctaacggttttggattgcatgtatataataaatttgttccaaaaatatacggtctattaatttataacgaagctcatcattgcttagaattgtatattcacctcataattagccaaaaaggtttaccctaccataaatgataaaatccctagccttgtggaatttgtttcgttaagatatttgtatgtatgcctccaattacgatatatgacgatgtagacaaactataagtctagtatacgactctcctcgtgcggtcttaattgaatagaatacatagaactttaatatattcactttaaaagtttatattttcctataaagaaaatatttacaaatctttgattactatttactccaaatcaagcatgattaagaaaatagtatatagaacaattgtatgataaatttggatttaaaaattacttctaaattataaggtagtaaagaaaaagaaaccaaaaatataagaataatagatgtgcaatatctttgattcaggtgaattatattttaacttagatatctcaagtcattttaatgtttatatcaggaaataaagaaataaaaaccatcatgcaacaaatcatgcatatatattagatacatccgtaaccgctttttttcgtcttttttttttgtttttttcgtcgtcacatccataaccgttttgatatgagatctccgatgttcaaaattcaatttcccccaaagatatcaatttaatatctaatatatactattattttaagtttgcgcagtaatttaataatctgagacagacatgatttacttaatgtatacgtatagtggcttttacacacattttatattgaaagaaattcaaaggtattcaagctaagaggataaaaaacacaaatgaaaaagatagcgacagtatcttttcacaaaggaacgtctgtgtactagtctgaaactttagttctcttccttactaacgataaaacatatttaactaaaccataatttatttacaaacaaaacaaaaaagacgagagagagaaaaaaaagccgtcatctgatctcttcaaaaacgcatcgtattctctcacatttttgcatcacattcgtttcttgaatcccctctttcagagagagaaagagagtcagagagagagagagagagaatgttccatgctaagaaaccttcaagtatgaatggttcatatgagaacagagctatgtgcgttcaaggcgattcaggccttgtcctcaccaccgaccctaaaccgcgtttgcgttggaccgtcgaactccacgagcgttttgtggacgccgtcgctcagctcggcggccccgacagtatgaacacacatacacaaatatatattcaatccatttaaccaattataaatgtgttttttcaaagtttttgatcatttctatttgcagaagcgaccccaaagacgattatgagagttatgggtgtgaagggtcttactctttaccacctaaagagccatcttcaggtatgtacacaaatatagattagggtttttttcttccttgcttttaattttctctcctctttatcttttctattctttttttcacttaataatataatataataatctaacaacttatttggatctatgggtgcagaaattcaggcttggaaagcagccgcacaaggagtacggagatcactccacaaaggaaggttcaagaggtgaccactcttcctttctctatcaaattagggtttttataaaaaagttacccataatatagatatgtattaatgtatatatatgttctttgatccgtcttcttctaattttttttaccgtacgtgtagcttctgccatggatattcagcgcaacgtagcttcttcttctggcatgatgagtcgcaacatgaatgagtaatattttaatcagatttcgttaattttctcaactttcattttaatatatattacagcaactcacaccaggttggtttgatcaggatgcaaatggaagtgcagagaaggttgcatgaacagctagaggtaattaattaacctatagatattctatgataactgcttgtacaaaatcaatttgtatcccataaatatagtaaatgatttcattcaatttttataggtgcaaagacatctgcaactgaggattgaagcacaaggaaagtacatgcaatctatcttggagagagcttgccaaaccctagccggtgagaacatggcagccgccaccgcagcagccgccgtcggaggaggatacaagggtaatctgggaagttcgagtctttcagcagcggtgggcccacctcctcatcctcttagtttcccgccgtttcaagacctaaacatctatggaaacacaaccgaccaagtcctcgaccatcacaacttccatcatcaaaacatagagaaccatttcacgggtaacaatgctgcagacaccaacatttacttggggaagaagcgacctaatcctaattttggtaacgatgtaaggaaaggactattgatgtggtctgatcaagatcacgatctttccgcaaaccaatcgatcgatgatgagcatagaattcagatacagatggctacacatgtctccacggatttggattctttgtcggagatctacgaaaggaaatcaggtttatcaggtgatgaagggaataatggtgggaaattactggaaaggccatcgcctaggagatcaccattgagtcctatgatgaaccctaatggtggattaatacaaggaagaaactcgccatttgggtgatacaatttattaatttttatctatgagtgatgcatgggaatgtaagaacgagatatatatgttttgtcattgtgagtttgacgtagggtttagagatgagacaaaacaaaacaaaacaaaaaaaaataaaaaatatataagctttgttatgtttaccggattagttttgctcgtgttttataatctgtacggaaactatatattattgctgttcttataatattttaggatctatatattttgtacttattcgttacttatttcttctagtcaactgtttgatgattgatctttacattgttagtctcagtagaattgccgaatatatgttttgttattcttttatcacccacataaaatctgtagttgccttttatggttaactagctattttcatattctatgtttgatagctttttttaatggcaatttcaaataaattaagtttaatttcttacatccgcaattttatttcatatgtacatacttgtacgattttcatatttgacagtttgccaattagaggcatataaaatgtgaatgtactaaagtatatctagtacatgtatatgataaatcagtacatatgtatattaccttaaccagtatatatatcccatgcatgaacgtaactgtatatatgacaaataataaacatttatgtgttaagagctaggttgctcatgtttcaaggcatgtacgatattttaaagcttttgaagggccctttgctttttcatgagttagttatttctatctcaagttagtttgtacttgatgccttatatatgattacgctaaaatgggatatctgcatcgggaaactaaattttcaatcaaacttaaaaataaagtttatggtaaaaaaaaatcataagtaaatacgaaaaagaaaggacagcgcaagtgataatgatgatgatgatccccatcaaagcaaaaggtttttagggttttgggaaaaccacatgcaaacaccaagaaaagctgtaaactttgattcaaatgtatatatagtcacttgattttgtaggatactactatgtatatgtgtatgcagttgtacgcatatgtaagtaagtgtgtatgtagagattgatagctacaagatccttttcaaaagaaataaaagaacttgtcataagagaaattaaccgacactgagtatctatctttccttccgtatatatctttgttctttattcttttatttcttttctgcttcatatgaccactaattaggacatatatttatacaaaagaaaattattacactgatcattcttaattgaatttcaggagcttagttatagatcttacaaacatcgggaaaaaatgtttgtaattcagaatttttgctctgctatgatttttacttactcgatgcatccatttagtcacaactacaaattacggctcatatatgtatatgtttatataaattattactgatcaactttgttgggttcagagagagaaaatataaagatctggtcatcactgcaagttggcaagtaaaagagaaagctctctcagtctctctcactctctctaaaagctgaggaaaacaaaaggcaaaaagagaattgaagaagaagaaggagaagcatagagatattaacgcactcccatgtatgcacttctcgaggaagcttctcttctccttttacatacgcccccactaattccctctaattacgttcctcggtttttttccttctatttaattaattggatttgaagacaaaaaagagtagacgaccatgtaataataattaaaaacaaaaaaaaataaatcagataaatttcttttatttatttattattataaaaatactatataaattataactaaaaataattattatttggggatacatttgaaatatcatatactttatcaataaattagttatggtacaataatcaatttaattgtgaagatgcattatatacaaagtggatccgacgaaatgacgatgatgcatgttttgtgaatattcatttcacaataaaatcacaccaaccacaagttaattattataactattcggtgctttttaatatatatccatctgaacatctcattctgttacttttttttttcgcattcacatgcataaacgtgcatgtgatcgtagctttacttgtatatcataattttaaataggctaatagtaaagctaatgtttgtacacatatcatatggtaattattatggttgttaagcaaactaaagtacttataataaacaaataaagtaataaaggtaacggtcttggatggtctatgcacattcttccatacaaatcctctgtaggcacctcattacgatctcgaccttggattccattttctactcccttacttcttctgttttccaaaaaaaaaaaaaaaagaagaagaagaagataatatacttctttttgatattctatatttttcaaaatgatactttatttttggtatgtgttgatgtagaatgctctcttaacaaagtacattcccgaagcatctatttttcttgtcccttctttctctactgtcgtcatttttccattacttctaagttctaacctattttgagtattttccaaaaaattcaaataactattcatatatttttattacggaaagaaaaataaatcattagatttgttacattaaaaaaaaaaaaaaagaatagagaagaaaagcccatttgcatcagtttcttgtttacgctgaagaatcagactgggcttccatataatgcccactaagataagtccaataagaatgttatatatcctccctagtacgaaaaaggaaaatccctagttgagaatcatcaatccgattggcggtaatgacgattctggtttcgtgttgtgaccatttccgatcttgagaattaatcgtagacttttagtaaccaagttaaccttagaaattgtttgactggttgctcatatcactaaatttccgcatatagggttttattcagaaatttatggagaaaaattagagtactcatgtcgtgggttctgatttgactctcttgtaccaggaataatatgggtatcattaagggaaatctgaggccttagttagtttgtatgatttttttttgcttgatttaatttcaggaaaatgaatggtttttacttaaaatccaataacttttaaacgaacgattctgatttctccaacccaatccaatattagaactcgtcataatcttacaagcttacaacccaaaataacaaaacatggatttttagattttatagaacaaacatgtacatacatataccatcaacgaattaacccaccaataaaattgttttctggttattaaactagtccacataatcatcgggaattaacaatactgtaaatattattattgttagggttagtatcttcaaatatatcggcgggaggaataaaggagtccaaagagagaccaggcacatcgaaaacgacgtcgtctatcctccaaatctcctccatcctcgttctgctatactgcaacgacgtctccccaaatcggaacaccgtcgcgacggcacgaccacaatgcgcgacggctactccgtcaacgtcacggtaatctccgatgcttgttccgatcgtcgtctcccagtaaaccgcctcgtcctcaggcgagatcgtcataaccctagtgaggtgcgaatcctctaaatagactaatagaccgcttttctgacagaagtatccgtacagtgcgtggcgtataacctccgccggagctccggcgtcattccgttctaacaacgagtcacgatcggcggagactttgagcacgaaacagtcatcgtcgccgattcttcgttcgcctaagcattgggcctttgcgaataggcttgctgtggtttttgggtccaagccctgtagcccaattacaaaaacaaacgggtttattaaaaaaatattcacaaatatctttatcaaaaaaaacagaaaaggaaattcacaaatatattgattttgtgttacttaatttaaataaattatactactatccaagaaaaatgtgtccggcaaatattcgttggggtttgaacgacaagaacaataaagcaaaagatttaaaagaaagaaagaaagaaagaaagataaagtgaaagacaaactttgataatcccaagaagttcccccactttaaaaattgaatgaatgtgtaagatcgtattcatgatgaagcatatagtacattacatagggtttcaatactattagtataatgtcatattatttaaaccaataattgtacacagtcacttaacaatgcgctctgaatctctgacaatttaattatttcactatcttttagaaataccccaataataataaataatctaggacaagaacctcataccttgctaaaaaaggaactaaaacttgaaccattagcaaaacattttgtaaatagtaagtatacggactaatcttaaagaacaaaaaaaacaaatatacgattcaataacagatgacgtcacgtgacaagaaaggagaaaaccacgtgtggtggtgggagagtcaagagtgggtgaatggggttttgtttgattttgaagtttcaagagaaagcaagcaaaaggaggagacagcttctccatcacttgtcaggttagtatttgttttttttttcaaataatattattagcttattggacagcgaccactctttttcctaccacgtccttatctcttggacaatcttattacgtcatctctcctttttgccaagtttatgcaattattttcttctaaatcaatgttaatactatttttactaactaaagttatgttttgtagtattttcgagtaattatcaacatgaaattacctggattagacgacgaagtggacgttgagggcctttagcggcgtgagtaccgagccatggcgtatggcgccaaactgttttaccgtccgagccagagatgagtttagttccaccgagaacaagctccagagaccacattccaggctgcatctgccacagcacgaagcaaccactatctccgctcctaccgtttccaccaccgcctagtgtcttcacactttttccggcggctatctccgtctcacagcaactcattttcattatccccgtcgcgtacatgtttttcgccgccttcgctcgctttagacatcccgtcgccgctaagtattgttgtattatataatgcgctgtcgacgtctcctgtaattatacttatgtattattaattaacaatccacatcatactaattactttgcataatcaaatggcaaaaaaaatcattggtctcagtgatgttttaacagacaaacaaattacatgttgatttcacatgttttggcccataacaaaattattaacctttgaacattttttcaaccaatcttatctcaaagataactattcagacgactttgtttggccaattcaaataattaatataaacctaccgtttgaaatttcgacacaacaaataaccagaaaatattttttttttctttttctcaaaggaacaagatagaaatataataaattaagaaacacaaataaaatttgtatactgaaaataaataaataaatataaaccaaagagagggaataattagtaatactcacaaatgggacattcttgatttggaaagaaccaagaagagggtcatcgggaaataggtcagagacgacaacggagattggagcaagaggacaacccaagacgccgagcaagagcctcaagtcttgtcccttagctggcacgtcatagctgttgcaaagtggttggaccgaaggagatgacatatttccagaaatgcccttatgaaccttaaaccattctctaattgcttcccatgagctctccttcttggttctttcgtcttgcatgtctggatctggtccttccattaacggtgttagggcttgtggcggcgttccccatctttgctttctccagtatgactttgagttgctcattctaatcaaagagtgatggtgatcagtctgatgtttgtgacgttctttttttttgtttgaatatctaacacaatggtttttgtaatggatagcgattattggcgtatttatatatatgtatagagatgtatatgtgtgtagagagagacaaaagggacattttatcagtctagcggtcccagaagtttaacattataattttaaattcatgggaagaagcttatagtaattagttcgaatattgacaataaaaaataacttatttggggttttaaggtttctttaaaaatttaattaattcttgaaactacgtatggctacttgttgtatgttatataatctgcgtctaatagtaatagactatgttttatataattggtaaaccgtgtaagtattctgcgtgatattgatttttgtatattcagcattcagctatatatgtgacaaaattatgtaagttttatatgaatttgtcttgtcatttaactgtattatatggttttattttgtcgtatggaaaatcaagagttatgttacaaatgtgtgtgtttcccaacttgttttctgcaaatatgttatctatctatcttgaagagacaatgtatctataattagtcatacgtggaaaggaaatgtggaacagcgactaataacatggaataaaatccgagtcatgtgaatagatccgatccgtgcagtttctttttgtacactatgggctctccttttgagtcttcgatcacacacttttttggtcctttaaatttgaatatcatattagctcgattagcatatgatctttgtcttgtctttcgaggatatctaggctaatcattttaatttaattgtaattacgatctctaggtatgatctttcttggaaaatgacactacacccagtgatatatattactgtggattaatgaatttttaatactgtttgtagttttctttttgtcaaataagagatgttgtgtctttttataaagggcccatttaaaagatactatatcaaatacaatttttatcttttatttttgttgttctttttcaccttttattctccggatgtcttgggattcgaactcacttaaattcctcatagaaaccaaaacattgagcactaattttcctataatctcatataaatgtggataaaaaaattatgcatacataaataagattatttgaaaatattgaaatagtgattagttaatacctaaaacataatactaacaacataaccctaatgcatatcaaatgaataataaacatttgaacaatatgtatatataatatatgcatattcaacacaaggtggcaagtcaccagtgagaatggtggcggtagatgaacatagataatcttataagccaagcttataataatttattttactattcaatttgatagtcccctttctttattcgttatattatatataacataatttcttggcgaattatgacaaaaacaaaaaaaacaaaaacaaaaaattatcggcgagatgttaagagttgagtggtcaagtttcacaattctctgcaacatgtggaagcataacgtacttatcgtgggccacacgtgagcggtagacttctcaatttgagtaaccaattaaaatgggctttacttaacggcccagtatgaatttataagcagaagtgtccatgttgatatgtcgcatgtacttacatcagcaactatgtatttatattgtgcttcaattattattggtcatagtttaacacaaaaaggcccgcacagatacaaatcttaaacagtttgttcaaaaagacaaaaacaaacaagaaaaaaacaatttctcattgatcatcaaagatcagatctcttgaccacacattatatattttcaaaagtactagttgtttgtttttaattttgatgtaataattctcacattctcaacaagatcgatcaaagtaagcaaccatggcggattcgttggcaccattgttgcccacccacattgaagaagatgaagacacttcttcacctctgactttcgacaagatcctcgagaaaagcttgtctgatttcggattctcgcagttcttacagatagttctcgttgggctcgcgctaacctttgactctcagcagatattcatcaccgtcttcacagatgcatatcccacgtggcactgtcttgaccacacgatctgcaatccggcaactaccgatatctgtaagattccccggtcagcttgggattgggacggtggtttcaaaggtaaatcagtcatttcagagttcgatctcgagtgctccagctccttcctcagaagtctacctagttcaactttttatgtgggttctatcgttggtggagtcgttttggctatgatccctgacggttccttgggacggaagcaacttctttttttctcgagtttcgcaatgtcactcactggaatctctattttcttatcctccaacatatggatctactccttcttaaagtttgtgatcggattcgcgcgttctcagaccgggacatacgcgttagttctgataagtgagcgaatttccaccaaatggagaccgcgagctactatggttccgtttactctgtttgtgttagggttcatgtcgttgtctggaatcgcttaccttgtccgacacgcttcttggaaagttctctatctatgcacatccattcctgcaggaatccacagtattttcatctatttctttgccctagagtcaccgcgttggctccatttggaagggaagaacaaagaagccattgaagtgctcaaacggatttcacctgcaaatagaggttacttggaatccgtatcttcgaggttacgtccaaaagaaacactagagcaaacttcaagctactcaatcaaagacttgttcattataaaatgggcttttcgaagagtcacacttgttatgatcataatgtttgggttgggaatgtcgtattatggagttccattagcggttagagacataaaagtgaacatttatatgagcgaagccctaaacgccatggtggagttaccaacatttgttgttacaccgatcttgctcgagcaattcagcaggagaagctctgtgcttgtaaattgcttaattggaggagcatcaggagtgctctgtttcgtaatgagcctttacggaagaacaaaaatcgcttttgctctcgaactcggttctttcttctgcgctaggattggattcaatttaatggcgatttatttggttgagttatttcctacatgcgtgaggaatagtgcaacaatgatgcttagacaagcgcttgtggttggaggagcttgttgcccactcattgcttcgcttggaagaaatgtgccgtcactctcttttgcagttttcggatttgcaatgtcgggtctcgggttattcgctttgcttcttcctgagaccaaagggttaagtctttgtgatacaatggaagagcaagagcaaagagaccaagccttgaagactagccatagttgctgaaagcagagttttttgaaaaacctctgttcttttattgaactttcgtataaaacctctgtttagctccggttaatcaagccatatgttgattttccgagtaattaatatgcgaaacctacaatggcatgtattttttataaactgaaccatttcattttcttgattacaaaaatctgcataaactaggaaacgtttgctaatcatctataaagctatcatgtgaatgtctctgtctttgaactactaatacagaagcatttacatctaaagacgaagccaagaaatcaccgacagttccaagctccggacactcttcccaatctttcattctcaccgtcatagggcaatctcctgtgctctttccgaccacaaacagtgaatacatctctccaatctctcttagaatagtcagcgtatgcggtccattgctcactagcttctctatgaaccccacttgtcccgttgttacaaatctgttgcacagtggaaaataatgtcaaaagtagtttctttgatggaaactgaactttccctagcttagataagaaacaaagaaacagagtagcggcgggaaacagagctcttctcagaaacagagtatacacaaaacagagcagtgataaaaacagggtataagtaaggtacctgttatagaattcttctaagaagctccgatctgtttcttgttcagtttgattccttcccagaacttccatgaaaacctcattattatctcgtgtcatagcatttccaacaggagtctctgcctttgattcctcggagacaaactgtataactgtgagatgaatcagagtattattcgcgagccatctgcacagagcaagagcctcacgatcatccggaccaccaaagaacaatgtcgcgacgtgttgtacagaatcaaacccgtgcggctgctgaaatccggttatgttacggtccacaaaaatgccaatggaacacggaccgtgccttagaacattacggttcatctgtctgaacagttccccatcgtttgtagtcttcccatcgattctctggtgtttatgaaacggaagaaatacaatggaaactcgaagatcctctgttgcgttacagatctcttcgtgcatattaagcatctgagtcacgagcttcacttgttggatcaagattttgctgtctttagcaaacgaatcaatcgaatcgttgatctctaaaccttcgttggtcccgaattcgtcatctccattcgcattgcctccatcttcgtcgtgctcatgatacatcagttccgattttcgtttcttggggaggggtacaaggtgcataagcagaggtgtaaacggatcagaggctccacgagaaccgctcaaggccgagacaagagagatcgcaccgcgagcatgacggactccataggcgcacgataaaatgcgtaattcctcgttcgtgttatgagactcaagcgaagtcttctcgtaagcaaagtccttctctcttgttttaagcaagaaagatgccagaacaccacttactagcgtcgttatcaccaaagcagccaccatcatatcatgaatagttgtggtccaccatttctacaggtagattcagacaaagaatgggaaaaaaagaaccataagtttttgttattatatatgttaattgttcgtctgttcttgaccaaaatataccagaccctaaaacatgtgtaacattttttgttgttttgttgtgggtgtgcaataacagacactctacaattgaacaagacttaatgtgaatggtataaaagtagcggaatcatataagtaaacgtaccttttcggaatagttggagtctagaagaagaagaccgacatggcctttaacagagagaatggtgggtaagaaaagccaatatttcttagggatcttcaggtacatacaagcgcttattacaccaataaatttcccagctatggttacaatcacgataataactataccgaggtaaaagcgtttggttaacgcgatgatgctgaatctgaatccaatgtaaccaaagtaaaccggaagaacaaactcgtgaatcgggtaactaagccgttgtatcaacgttctgtgagtctttccttgtcgtggaaacattatgccaatggcgaaaacagaaaccgaggaatttacatcgtaggattcgatagttataccgatgatgagaaggaagatgaagaaaactaaagtttcagcctttgagaggtacttctctttagggttcctctttggaagccatggagctaagaccatgttgatcaatattagggctacggttgccaaaagaaacaagaagagttcaagtatgatagttccagagatgaacgccatgattatagtgtagagaaccacgtttgttaattcgatgaacaacgcacatgagattgtcagccgtccgatctcacatgtgttgagtttccaatcagcgattgaacggactacgacaggagatgccgtgttagacaaggtaacgagaagaaccaagaaaaacgtaaagtaatcttctttgatcccaaacaaagggatgaataacattaaggaagcgaaactgaggaggccggaaaccacgaatgagctcaaggttatcaccgcagctttcttgaaatttcttctcatgaaatgtagatccacttcaagaccgatcaagaacatgaaagatgtccgtaaagcgaaggagaagaaggagtaataatctgctgcatttttctggaggaagaattccttaactttaggtattcttgagagcaaaacaggactcaacacaatcccagcctaaaaaatatccaatatggataacaaaacaaaaacttgttagacattttccactacaaaaaaccgggtgattcttgtaacgcaagaaagaaatttccttacaagaatctgggcaacgggaccagcttggccgcagggtttaagaaggagataaaacaattgagagaagacgagaatgcaagccatttgaataaacatggtattaaggggattaaacagttcatctccttgaggtaagcaaagcaacaactttggatccatcttcttcttcttgattcgatgatcatgagcattcttcaagcgtgatggtgatgatacgcttatgaaaattaaaccttatgttaaaaaaaaaactgaaaatgctttctaaaacaagaatttataattttcacaagtaatttagaaattaaaaaaaaaaaaattagtttacatttggttggagttgatagatgtgtttacaattatttgaacgtccttcaattactctacgcctctatttcaacccttggaaaacggattaagttgactgtaatcagaaattttacccaaaaagtttactataattaggttattatatggtcaataatcaacagatttaacaccataagtccataacatatttcttatcttttgtatatatatgggaagttaatttttgtgttttgtaaacaagtaaaacataatacagatgctagtaaaaatgacaatttgcaaattacctcttagccttacagggtgttgtttaaccaaaagaaaactagagtgttcatggcataataaaaaacaaactataggggctgaactataatacacatactgttcaggatacaaacgaaacatgagaataatatggggtccaaaaagtaaataaataatcaaataggagttctttgcaattaacgctaaagtgcgaacctgtaagtcaaatcatgaaccctaaaaaccccaggtgagaagaacggagagagagagagagatgtcgttcatgtatgagaagagcaatacatggagatggctagtgatgaagacgcgagattcgagatccttcttcttcacgttcgctgctttatgtggtgtcattcctggcgttattggctatggagttatgcaggtcaccaattccagtaaccctgagctcgaagcccgcctccgtaaatctgctcgcccagatactctcgtatgtagttggttttcttctattgatgctaatcggtgttgaacttgatggttacaatttgttcgtacatagttcctatagttgtcttgcttgatgtgtggaacttttcttggaggatgagtagaactttgcttgatgatgattctttctgctactttgcaaagctcctatgggattgggtacctagaggttagaggtgtttaggcctcgatatgttgaattgagcatttgcattttcttgttgctaatacaccaatccattgttctgtgttaacaaggaatttcatgtatctgagttcttgctctgcttcacaatgtcgattcaattggaagtttattgatcacagccgtatgttaaccttaggcttattgttaatcttcaatctttttgtgttatgatgaacaatacatttctgtttttgtattgttagatgatgggtaaagtaaaccaagagaggctagctgaatatcttggtgagttgaaacagaagcaggatacaaacgacagatacgttgctgctcttaggggagagactcttaccaggaagccttatcaaagaatccaaccaatgccaaagccagatgacacggtgacaaccaaaactcagtaaggatgaattattttaagagtcaatgttagtgaatgcctctcactcgaatcttttgtcgatacaaaaatggcgtgtttcctggccgtaatatcttttgtttttgaaaccggcatctagcgacacaacttttgtgctatgcaaacggctacaatgtcaatcacttcaaaccttttgttatgatgaataaaatgtaaaacttatgttttgtaatttgtacattgcttcttcattcttgtttgcaaagttaatgttttacagtacatacagaattacatggtacacgctgattgtggaacattgtcagaaacacttggcaaaccaaattgtagattctacaaaggagatggctatgtgcaagcgatttgttatgtgcagagataaagtttgttggcattgatcacgtgtaaagccgtggtcagaaaaaaagttcgtggccattgatcatgtgtaaagctttagccggttcgtgatccttactcgacagatcgggcaatttgatattttggatccgcaatctccacaagtctgcaaaaggaaaattgcaaaggtaagttaaaactggttgttgattaatgaatgggtttgagtaaactaaaagcaatcggtgaaacttaccatgtggccacagctgaaagccacgtcttttcggttagtcagacaaatcgggcaactctgttaaacggaaaaccatatgagattggagttgattcgacaaggcagaaaaatagtaaagtatacaaattatgagacctgggtttgttcaggtgatgcaggtgatgcagttgatggtagttcagcattagttggaggtgtgtacggaattggtggtggcctcggaactattgtcttcgctaagcccgtctgcttcctttatagacgggtgcagaagtggacagggaccagcagaagcaattagacaaaaaaaaaaaaaatagagcagaaagacggtagttctgttatgctgagaacttatggaagtacccgagtaagcggagttcgatggctgcttgatactgaaagggaatctccattagagcagctagagcaaaagcagtttctttggcagactctggtgagtttctcgtcataatctctgtgaaattcacaaactatgcatagaccagagatcaagaagatgctcaaagcagagaatatagatggaaaatagcacagaaactgggaagatacctgaaagttgtcgaattcacgcttagggatcttatcatcgaacttcctcatgtcttcccatggtccgtctccaacaccgactaaaacaatcgacaaagcatacgagctgtagataataaaggaatttcgaaaaaggcttgtttagataccgcaaatcgagttgcgaaaaatgaaaaactgaatctgcatttttttaccttgcatttacaatcgcgtcgatggttgttttctcttgttgactgagttctccctcggccatatccgtacctctcgttaccttaacattcaaaaggtagccttttaagttttggtatcatactttgtttctcttaactgcttgtaactttacctgtccatctgcaacaatcaccagaacatggaattgtccgttgttcttctccacaatgtcgacagcagcatcgatgagcggtccatacgacgttggcccttttgaacacggaaggttgtgatttggtgataaagctatggaaggtagtatttagattttcaaagaaagacctgatagacgcaagttgggtgcaattctcttgtaacatgctaagacctcttcgaagccatgacatggagaattgtcgctatggaaaccgaacacttcctcgtcatgagttgttgctggatagtgcaagaaaacagagtcttagaaacagagagtgaactgaagatgatatttttgggaaagaaaaacttacaatcgccaaagccgaaacaagggatgagattgtcttcatcaaaaggagccaacgtttggccgattacaaaaatcgccttttcatatggattcgaagtttcgccgagcgcgtgcagacattttccatcgaaagaagttttccctgaaacagaacgttaaccacttttttgtttacagttgcaaaaatatatatgtgaatttaacaataagttgtatttgctgaaggtaccagtccactcgttgctctttgtgaaatcaactccgagaatgagattggatgattcaagaccagcttctcttagagcttttgataccttttaaacaccattcactagttaacactcagtaacaactctccatctctaattagtttccagacaatttttttactcaaaatcattttatgtcccaatgtcaacgaatgaatggaggagaaaaaaaataatcatatacatctattagacttttgaagaactcaaagaacatggaagtagcagaagacatggtgaaccaaaagtcaagtcaacacaagaaattgagagatacaaaaaagaagagaacctggtcgagggaagagaagcggtcagggatgagagcgtacttcttcttggtggcgttggtattatcggcaagggagagtgaaggatccgacggtgatggttcatgagattgagacgacgtcgttcccagagtcatatttctactgcttctgctttttccacttccaaatctctttaagaaattccccatagtcatctcctttcttcttcttcttcttcttcgaattggaattcagattttttttcttctcttgataatggatagaatctttttttttttgggctggaatatttaagaagactactcttcaagacgccaaggaaacatttattgcttcactgttctttataattttattaatttcattctacgcggcaacaatcattacttttctatgtcaaccactaattgttgttatctaagtatttttgacgcggccagatggggacttaaacatttatttactgaacccacatgagttcgaacgaaaacctagaaaaaaattaaactatatattatacactgaagatcttatgagatttgatataaatataggatcattaatgctaaaagaatgactttgtgaacaagatggaattagatactcttcttatgtgctaatctcaacttgcaagttaatttctccatttttgcactcaacccgtttctttacttgaagcttactttgctcaaattaaaacggcagaacaatactgggctgggccttttatgaacgttatgggctatattcctcttcaacttttcctcaagacaaaaactttattcaaattttactcatacatgacaatagcaattgaaatgtggtgccgttaaccggtatgatcaagctggaccggtccagagtttcgggtacatgtttggatctaatctgggcttcacacaagccatcaaaggattagccatgaacagattttcttttgactcgactagctcgactctgtccgtcgtaccaggaggaatggtccagtcgaacccttggagaagcctacccaacaacgtaacaatcatggacgttccaagcttagctccaacgcagccgcgtctaccagttccaaatgaaacaagtcgtaagtctggttcagtcaacaccacttcgttgccggttatatggcgctcaggcctgtagatgagtggctcatcccatgtcttagggtttcgaccaacacccggacgactcactagaatatgactgcctgtgatccacatcaaacaatcaatatattaaagttaataaacaaataaaataataatttgaaagattcgtatgtcacaatctacttattttcacttttcagtccaaaataataaatcaaaggaacaaatattctaatatgaaaatattgctcaaatcaagcaaaaataaatatagttagaattcctgattctacatttaaggagttggagtcaaatacgcctaaatgcataaattttggggaaaaatgagataccttttgggatgaaatagccagcgagagttgtgtcatgacgtgccatgtgagggacaaggaaaggattggtagggtgaagtctcagggtctctctgcaacaagctttgacgtagtttagatttggtacgtcggattcttgaacaagtctttcttttccgacaaccatatcgatctcttccaccgctttttctagaatctctctctggttcaacatttccgcaagtgtccactctattacattcactgcattatcaatccctactacatcaagatcctgccaaaaccaaaaagaaaccataacttatcagatatataatatacaaactaattggtagtaattatatgagtatatttctatcacgaaccacagagagatgtgtgatttcttgcggggtaagcaacggcttcccattctcatctttaagagtgaagagaatgtcgagccaatccttgatcataggaacatcattcttcgtctccgcacgattgtagtctttattctgccccctccacaactctatcttctcatcgataatcatcttattgtacctagcaatcacatcaacggcttctcttaactcagcctcctctccctggaggttccatcctcttaagaaagggtagtaatcggctacgtaaaagctaaagaaacaatcaagagccgcgaaaattgcgtcaaaatgttctttctccataagtccgagactcccgtccatcgtcgtctccttgaaatgtctccgaccaaacaagagtctcatcttcacattgtgtgtgtgagtgcacacaatatctctcacgttcactacggcgccgtgttttgtcttggactcatctttgttgtataggttatgaacatacgcgaggaggttgtcggattctaagtttctaactttgagtaacaagtttaaagcctttgtagacattaactccgacgacatcactttcttcatcttcatttgtctctctccatactcgtcgaacactaccccattgtacctaccagttttgtaacgtttttacacatggtaatacacaaactcttatacacagtttgcaacatatacgaaacatatatgttaacaaataacagtatttttgtttagtcgagctaagagaactataagcttttctaggaattgctttataatttgaactaattttcaagtgaacatttcagctttgttatcaaattcaaaattacccaattaccccaaaaaaaaaaaaaaaaatcaacattacccgccactaatgtactcggcagagtaagaatctggcctgtccgcaaaaactgcgtctttctctcgaacgacttctcgggcaatcacatcggacgttatgacaatgacgtggacacgaccaaaccggaagcaagctatatccgtcttcatatcgttcattacacgaactatccatttagaggttggtcggttcttgagcattcctactaagttcccaatgatcggaaatccccgtgggcatggaggcagtttcttacgacgaccaagaaaacgggcgacaacgctttttatgagaaacacaatattcagagtgatcgaaaatgtgacaacaactgagaagataacattattcagataataatccattacctctgctcagttggaatatgtaagtaaaagtgtttctcttatattccaatgatatacaaagagagctatatatacaagatgagccttggagattctaggtataagctaactgtaaaatgttccttaaacagagtaatgagatattgagacataattgagaaatcactgtcatatctctaaacagaatacacatatgtaaaaaatgcattatatctgtacaatcttctatatacgttttttttttttttggtaagaatcttctatatatgttaaatagatcttttgtatgatatatgataattatgtaaaatctaaaa

SEQ ID NO: 377 - DNA, 2506 bp, Arabidopsis thaliana
cgtcagtcatcaaggctaattcgtcgcgagttgctacgacgccgtttcggttgcttctggtttctttatgtctatcaaccttcgctcctccggttgttcgtctccgatctcagctactttggaacgaggattggactcagaagtacagacaagagctaacaatgtgagctttgagcaaacaaaggagaagattaggaagatgttggagaaagtggagctttctgtttcggcctacgatactagttgggtagcaatggttccatcaccgagctcccaaaatgctccacttttcccacagtgtgtgaaatggttattggataatcaacatgaagatggatcttggggacttgataaccatgaccatcaatctcttaagaaggatgtgttatcatctacactggctagtatcctcgcgttaaagaagtggggaattggtgaaagacaaataaacaagggtctccagtttattgagctgaattctgcattagtcactgatgaaaccatacagaaaccaacagggtttgatattatatttcctgggatgattaaatatgctagagatttgaatctgacgattccattgggctcagaagtggtggatgacatgatacgaaaaagagatctggatcttaaatgtgatagtgaaaagttttcaaagggaagagaagcatatctggcctatgttttagaggggacaagaaacctaaaagattgggatttgatagtcaaatatcaaaggaaaaatgggtcactgtttgattctccagccacaacagcagctgcttttactcagtttgggaatgatggttgtctccgttatctctgttctctccttcagaaattcgaggctgcagttccttcagtttatccatttgatcaatatgcacgccttagtataattgtcactcttgaaagcttaggaattgatagagatttcaaaaccgaaatcaaaagcatattggatgaaacctatagatattggcttcgtggggatgaagaaatatgtttggacttggccacttgtgctttggctttccgattattgcttgctcatggctatgatgtgtcttacgatccgctaaaaccatttgcagaagaatctggtttctctgatactttggaaggatatgttaagaatacgttttctgtgttagaattatttaaggctgctcaaagttatccacatgaatcagctttgaagaagcagtgttgttggactaaacaatatctggagatggaattgtccagctgggttaagacctctgttcgagataaatacctcaagaaagaggtcgaggatgctcttgcttttccctcctatgcaagcctagaaagatcagatcacaggagaaaaatactcaatggttctgctgtggaaaacaccagagttacaaaaacctcatatcgtttgcacaatatttgcacctctgatatcctgaagttagctgtggatgacttcaatttctgccagtccatacaccgtgaagaaatggaacgtcttgataggtggattgtggagaatagattgcaggaactgaaatttgccagacagaagctggcttactgttatttctctggggctgcaactttattttctccagaactatctgatgctcgtatatcgtgggccaaaggtggagtacttacaacggttgtagacgacttctttgatgttggagggtccaaagaagaactggaaaacctcatacacttggtcgaaaagtgggatttgaacggtgttcctgagtacagctcagaacatgttgagatcatattctcagttctaagggacaccattctcgaaacaggagacaaagcattcacctatcaaggacgcaatgtgacacaccacattgtgaaaatttggttggatctgctcaagtctatgttgagagaagccgagtggtccagtgacaagtcaacaccaagcttggaggattacatggaaaatgcgtacatatcatttgcattaggaccaattgtcctcccagctacctatctgatcggacctccacttccagagaagacagtcgatagccaccaatataatcagctctacaagctcgtgagcactatgggtcgtcttctaaatgacatacaaggttttaagagagaaagcgcggaagggaagctgaatgcggtttcattgcacatgaaacacgagagagacaatcgcagcaaagaagtgatcatagaatcgatgaaaggtttagcagagagaaagagggaagaattgcataagctagttttggaggagaaaggaagtgtggttccaagggaatgcaaagaagcgttcttgaaaatgagcaaagtgttgaacttattttacaggaaggacgatggattcacatcaaatgatctgatgagtcttgttaaatcagtgatctacgagcctgttagcttacagaaagaatctttaacttgatccaagttgatctggcaggtaaactcagtaaatgaaaataagactttggtcttcttctttgttgcttcagaacaagaagag

SEQ ID NO: 378 - DNA, 2658 bp, Unknown
  Coding
  misc_feature (1)..(2658): Coding
gaaagcggtagttttcggctcttggctgtttttgtgtactgcctattctgttctttatatgcactgaatgtgaaaatgcctcaccagagtttgatgctgcttccgcaatttctttgcatgtcctaaacataccagtcatgtatctttcccgacctaccggcgttgcccgttttgctgcctcctcctcctcctcctcctcagcttccctattccctggagtggatgtggacacaacaactaaaactggagctttgcactttgaagaaacaaaagaaagaattaagaaattgttcgacaaggttgaactttcagtttctgcatatgatactgcatgggtggcaatggttccttctccaaactctctcaaccaacctcttttccccgagtgtataaactgggtattagatagtcaacatgctgatggctcatggggcctactccacaacgatcagttgctgatgaaggccaatctcttatctacattagcatgtgttcttactcttaagcggtggaatattgggcatgatcatatgagcaaggcccttgattttatcaagtctaatatagcttcagctactgatgagaaccaacgttctccggtgggatttgacattattttccctggcatgattgagtatgctaaagacttgaatttgaatctacccttggcaccgacgaacgtggatgccttggttcgaaagaaagagttggagctgagaagctgcagaagcaactctgaaggtggaaaagcctatttagcgtatgtttcagaaggaattggaaagttacaggactgggatatggtcatgcaatatcaaaggaagaatggatcactgtttaattctccatccactacggcagcggcttttatgcatagaaatgatgatggctgttttgattatcttcgctcactcttacaaaagtttgatggctcagttcccacaatatatcctcttgatatatatgctcgattacacatggttgatagccttcaaaaattcggaattgctcggcatttcaaagaggagattagaagcgtattagatgaaacttacaggtgttggatgcaaggagaggaaaatatattcttagatgcttcaacttgtgcaatggcctttcgaatgttacgtgttgaaggatatgatgtttcttcagaccagttgactcaattttcagaagatatctttcccaattgccttggaggatatttaaaagacttcggtgcctcgctggagttatataaggcctctcagattatcacgcaccccgatgaatctgttctggaaaatataaactcttggactagtcgtttcctgaagcatggattatctagtgattcagtttggtctgatagaaccgatagtgttgttaaacaagaggctgttaatgctcttgagttcccctataatgcaactctagaacgcctaataagtaagagggcaatggaaagttacagtggagacattgtgaggatttcaaaatcgccatatgcctgcttaaattttggccatcaagattttctggaacttgctgtagaggatttcaataccctgcaacgcattcatcttaaagaactggaagagcttcaaagatgggtggttgaaaacaaattggacgagttgaaatttttcagactgcacctagggtactgctattttgctgcggcagcgacccttactgatcctgaacttcatgatgctcgcatagcatgggcacaaaatggtgtgctcacgaccgtggttgatgatttctatgatggtggaggatctgaagaggaattggataaccttatagaattggtggaaaagtgggatcctgatggggaagtgggttactgttccaaggacgttgagattgtatttcttgcactgcacagcacagtttgtgaaataggaagaagagctttagtatggcaaggacgcagtgttatgaggaatgttatcgatggttggttggctctgctgaaggtgatgagaaaggaagctgaatggtcgacaaataaggtagtgccatcaatgggtgaatatatggaacaagcccatgtatcattcgcgttgggacctataatccttccaatgctcttctttgttggacctaaactctcagaggaaatgattggaagctgtgaataccagaagttatataagctgatgagcactgctggtcgccttaagaatgatattcgatcttacgatagagaatgcaaagagggaaagctgaatattctgtctctgtggatgattgatggcggtggtaatgtcaccaaagaggaggccattgaagcaattaaaggggattttgagagggcgataagagagctgctggggttagttttgcaggagaacactacaattccaagagcttgtaaggatttgttctggaaattgatgtccattgtgaatctattttacatggaagatgatgggtacacttcaaataggttgatgaacactgtaaaagccatgtttgaacaacccatggatctggatgcactattgaacaaatgaacgaacaacaaacgaaataagttgtagtgggaagcagacgccacctattcactgtcttctctactgatcagatgtctattgctttctcattgaggaaatggcaaataaaacattttatggaaacatttcattgttaaattgagacagtctg

SEQ ID NO: 379 - DNA, 69350 bp, Mycobacterium tuberculosis
gtggcataacgcacaccaaaggccgagagcgcggaaaacgcagaacatcaattggatcggttgctagctttgccgcaccgtggtcagccgcgccaggatcggtcggcaatggcaccaccggagcaggcgaaaggtacccggttctagcccgtccccaacgggtcaatggtggatgcgatatagaccatggccgccgcgaccgtcacggtcgtcacgaaatcgatccccttgctgcgcaccaccaacaggccggcccgttcctcggacaacaccaaccgcagcaccgccgccaccccaacgccgataccgatcagcagcgcaccacggcgccagaagttgacccccgccaggatcggccactgggcgccaacagtgcgccgcaaaacggccctcacggtcatcgccgctcagccagctccacgacacttgtcagcaaggacgcccggggcgaagggcgttcgccaagtctgtagatgagctgcgggagatggccgacggcgagggttgagaagcgtcaacttcgatcgtgatgcctgggaggacttcttatttcatacgcgatcggtgatgccgccctgaagccgaggtcgacggcagcgcggagacgttcgagaagacgtcgcggtgaggtcaatcccggtgtgaccaacggccggttacggcccggtgcccgcgaacagcaggcccgacagctgctggccgacgttcataaagcccgagacgaaggccgatgtgaccaggccaagcgtgcccgtgttgtacacgcccgagatgcccgcgccacggttgaggatgccggagagctgggtgccgaaattggcgaagcccgacgccgacccgagcagcggatccgagatcgcgttgagcacccccgacatgcccgacccggagttggagaagccggacccgccaccaccgccggtgttgaagaagcccgacgacggcgcggtggtgtcgttgccaaagcccggtgctccgccgaacccgaaaatcgggaggctgacggggccgatggtggtgctggcgtgtaactccaccgggatccggtcgataacgaccgtcgggagatcaaagggtggggtgccgccggacaaaccgaggcccagcgggagttggggaatcagggtgccgcccgggatggtgaagcccggaatggtcagcgacagcggcaggccgatgtggatgggtccggtgggaatggtgaatccggggaagtgcagtgtcgtcgggttcaagttgatgggtgccacggtgaatggttgaagtatggagacctcgcccccgggcatgccgtcgggtccgaccgcgaagaatgaaaagctgggtctgaccttgaatccggagctgcttccggacgtcatcctgatctccgagacggcagcatccaaacttaggccagggatggtgagggtgatggggtccacggtgatagggccgacgtcgaaggtgggatcgatgcccaggtggatcgaggggatggcgatgttcgggatgctgatcggcccgatgtggccgatcgcggcgaagcccaacgggatggacgggatgtggatgggcggaatgatggtggcggggccgatgtcgccggtgacgtcggcgcccaccgcggggaacagcggaatggggtacccgaaggagaagccggccaagccctcgtaattgccccgccataagatgccgttgctaaagttgcccgtgatgagggcgccggtgttgacattgcccgcgttggcgacgccggtgttggcgttaccggtgttgaaccagccggtgttggtgctgcctgggttgaagccaccggtgttggtgtcaccagcattgaagctgcccgtgttgtacgacccggcgtttgccacaccggtgttgaagccgccggcgttgaccaacccggtgctggccaccccggagttgccgataccggtgttgtagctgccggagttgaacaacccgaagttggcagtcccggagttgaagaagccgatattgcctgtgccggagttgaacaggccaatgttgccagtgccggagttcaagccgccgatgccggactggttgtcgccggtgagcccgatcccgaggttgttggtgccggtgttgccaaacccgatgttgcccaggcccatgttggcccagccgacgttgccgctgccggcgttgcccagcccgatattgcccatgccggccaggcccgccgccagacccgaattcccgaacccgaagttggcatcgccgatattgccgaacccgacgttgccgccgccgatgttgccgaagcccaggttcacgtcgccaatgttgccgaatcccaggttcacgtcgccaatgttggccgcacccaggttgaggttgccgatgttgccgaggccgacgttgccgttgccgacgttagccaacccgatgttgacgatggtgatggggttttgccccacgttggaggccaacaagcccgacaggtgatcaccgacgttgcccaggcccgacaccaacgccggcgtcccaagcggcagcgtgctggtgttgtagatccccgacagccccgaaccgaggttgagcacgccggagtgcagtgtgccgacgttggcaatacccgaacccgcgcctgccaaagcggtgtgcgcctggttccaccaccccgacatgttcgcgccgaagttgccgaaacccgagcccccgcccgccccggtgttgaagaagcccgacgacggaacggtggtggtgttcccaatgcccggggtgggcgggatgttgatcagcgggatgtcgccggcgatgacgtagagttcgccgtcggcgttcgccgggatctccgggaacgtgatcgccggaatggtggcgccgggggtgccgacgaacacatccaggttcagcagcgagttcgccgggaacgtcagaccaccggggaacagggtgatcgcgtcgatgctgcccggcacctggaaacccaacgggatctggtgaatattgagcgccggggtgttgaacgcctgagatgccgcattgaagacggcatgcaccgggccggtcgtgctgagcgtcgggattcccgagatgatattgccgccgacgaacaggtcaccggcgttgtagattctgccgaccgagtaccacgttgggccgatcgcaccggatgacgtccagacgataaacggctctatttcgctggtcgccccgaccgacgcggccatatcgaggaccgctcgtgcggcggtcagggcgggaatggtgaccgaggggaccgcgatggggccgaagccgacgcttccggtgacgttcggattgagggcgggaatatcgatttgcgggatggtgaaggcgcccatcgccgcgttgccggtcaggtgcgcgttgatcgccagaaccgggatgggcgggacgaccaccgggccgaaggccccggtgaaatgcgcgtccaggatggtgatccggggaacgtcgaggctgtaggaatagctgaataggccttcgtagttgccccgccacaggatgccgttgctgaagttgcccgacatgagggcgccggtgtcgacattgcccgagttcgcgatgccggtgttggcgttaccggtgttgaaccagccggtgttgatgctgcccgggttgaagccaccggtgttggtgtcaccgacattgaagctgcccgtgttgtacgacccggcgttggccagacccgtagtgaaaccaccggcattgaaaagcccagtactgcccgttccgctattaccgatgccggtgttgaagctgcccgagttgaacaacccccagtttccggtcccggagttgaagaacccgatgttgccggtgccggagttgaacaggccaatgttgccggcaccggagttcaagccgccgatgccggtctggttgtcgccggtcagcccaatcccgaggttgttggtgccggtgttggcgaacccgatgttgcccacacccatgttggccaggccaacgttggtgctgcccgcattgcccaacccgatattgccgatgccgagcgccgcccccaggcccgaattgccaaacccgacgttgccgtggccgatattgccgaagccgacgttggcgttcccgatattgcccaaccctaggttgaggtcgccgaggttggccgcgcccaggttgaagtccccaacgttgcccaacccgaggttgtagttgccgacatcggccaacccgaggttgatgatggggctttgggtcaacgccgtcccggccgccaacacccccgacagctgctggcccacgttgccggcacccgacaccagcgccggcgtccccaaacccacgatagcggtgttgtacagccccgatatccccgagccgacgttcagcacacccgagttcagcgtgccaacgttgagaacgcccgagcccgcgcccgccaacgcggcatgcgcctggttccaccagcctgagctgccggccccgaagttgccgaaacccgacaccccgcccgcgccggagttgaagaaacccgacgacggggtggcggtcgcgttcccgaagccgggcgtcggcggaacgatgatgatcggaacgctgctgtccggcacgctgatgttgagggccaggctcagtggcagcggatcgatcgtgaaaccacccgggaatatcgtgatcggatccagcacgccggacgcatcgatggtcaacgggatcgcattttgcgggatgttgaggccaccggggaacagcgtgaaggccggaagaccgcccgacacatcgatcttgagcgggataggcgatgtcgtgatcgttgggatggtgacggttgggagggttagtgcgaggctaccggtggttgcgctgctgggaccggtatggatcaggatgccctgagtgggtgcggtgacaaagccaccactcattccggttgagttggacgccccaacgatccagttgtcgccgagcgcattcacgaacagcaacggaagtctgaagggcggcggggcgggggccgggggcgtgtcgagcggaatcgtgtaggtctgaccgccgatcgtcatgctcggcaggaagacgatgggcgggatgaccatcgtttcgtggatgtccagcaccactgcggggacatcgatgggctcgatcctgaagggcccgatgttgacgagttcgtggatgtcgaacagcgacatgccgggaatatcgatctgatcgatgtggacgggaccgaggttgagggtttcgttgatgtccaccagggtgctgccggtgatttcgatgctgtaggagaagccgaccagcccgtggtgatcaccggtccacagcgcgccgttgttgaagctgccggagttgaacgcgccggtgttgacattgcccgtgttgaagccgccggtgttggtgtggccggcgttgaaccagccggtgttgacattgccagggttgaagccgccggtgttggtgttgcccgcgttgaggctgccggtgttgtaactaccggcattggccagacccgtgttgaaactcccggcattgaaaagcccggtactgcccgttccgctgttaccgatgccggtgttgtagctgcccgagttgaacaacccccagtttccggtcccggtgttgaagaacccgatgttgccggtgccggagttgaacaaccccaggttgccggcaccggagttcaggccgccgaacccggtctggttgtcgccggtcagcccgatcccgaggttgttggtgccggtattgccgaacccgatgttgcccaggcccatgttgccgaagccgacgttgttgctgccggcgttgcccaacccgatgttgccgatccccggcagcgcccccaggcccgagttgccgaacccgacattgccgtggccgaggttgccgaacccgacgttgccgtccccgaggttgcccaaccccaggttctgcccgccgaggttgccaccgccgaggttgaggttgccgaggttgcccgcgcccaggttgacgtcgccgacgttggcgaagccgaggttgtagctgccgacgttgcccaggttgacgatgttcagcggattcaggtgccgcagctcggcgatcgccgcgtcgatgatgctcggctgcccggagccgcccgacccgccgctggtcagcatcgccagcaggccatcgatggacacccccgacacgtggttgcccaggttgccgaaacccgagatcaccgccggcgcggagcccagcgtgctcacgttgaacatgcccgagatgtcgacgccggagttcagcacaccggatgccaggctgccggcattgcccaggccggagagcgtccccaccatcggactcgaggcctggttcagcaagccggacacccccgcgccgaagttggcgatgcccgagccgccaccgccgccggtgttgaagaagcccgacgacggcagctcggtcgagttgccaaagcccggcagcgccggaatgtcgatgatcgagatgttgatgggtccggcgctgctgagaacgtcgaagttcagcggaatcgggtcgatcctggtgccggtgatggtgaccgccggaatgtcgacggacacatcgatcggcacgacctccgacatcgaaattccgttgatagtggaggccgggatgtcgatcggcggaatgtcgatgggtatggattggctgaacgagattgccggcaattcgatggcgtcgatggtctgctgcagcggcagggccaatccgcccagcgttgccgaagtaaggggtatggcgacctgtatctgaaccgagattgtgggatcgggaaattcatttgggaacgcgtcgtggaggaactgaagcttgaggttaacgttgaacggattgagctggacgtttgagacggtgatcgggccgaacctgaattgtccggtaatgcccagcgcagaaagcagggtggtggccggggcggtgaagccggcgtcggcggcaccgtcgaagtcgatgtggattgccggaatggggatgtccggcacggcgaagccgtagttcgcttgtcccgtgaggcccaggtggatggggggaaggatcgtggtgtccgggatgataatggggccgatgccgccggttgaagtccagtggatcgggaattcgggaatcgtgatgccgacgttcaggccgaacaggccctcgaagttgcctcgccacaagatgccgttgctgaagttgcccgacatgagggcgccggtgtcgacattgcccgaattggcgacgccggtgttggcgttgccggtgttgaaccagccggtgttgatgctgcccgggttgaaaccaccggtgttggtgtcacccacattgaagctgcccgtgttgtacgacccagggttggccacaccggtattgaaattaccggcattgaaaagcccagtactgcccgttccgccattgccgatgccggtgttgaagctgcccgagttgaacaacccgaagttcccggtcccggagttgaacaacccgacgttgccggtgccggagttgaacaacccgatgttgccggcaccggagttcaagccgccgatcccagtctggttgtccccggtcagcccaatcccgaggttgttggtgccggtgttaccgaacccgatgttgcccacacccatgttgccgaagccgacgttgccgctgccggcattgcccaacccgatgttgcccaccccggccaggcccgccgccagacccgcattgcccaacccgaagttggcatcgccgatattgccgaacccgacgttgccgccgccgacattgcccaaacccacgttcaagtcgccgatattggccgcacccaggttgaagtccccgacgttgccgaaaccgacgtttacgctgcccacatcggccaacccgagattgatgatgaggctctggttgagtgccgtccccgccgaggacaaccccgacagctgctcaccaacattgccgatgcccgagaccaccgccggggtccccggcggcaacccgccggtgttgtacagccccgacacacccgagccgaagttcagcacacccgatcccagcgaaccgaaattggcgaaacccgaacccgccccagccacctcggtctgcgcctggttccaccaacccgagctgcccgcaccgaaattcccgaagcccgacaccccaccgtcgccggagttgaagaaacccgacgacggagcggtggtcgtgttgccaaagcccggggtcgccgggatattaacgccgttgatcaggatagggccgacagtgacgctggcgccgaggttcagcgggatgcggtcgatcgtgatcggcggggtgctgaagccgtcaatctggccgtctatgtcgatcgtcagcggcagcggcgcagcgggaatggtgaagcccgggatcgtgaatcccagcgtgccgatcgacgcgctggccagcagcgccagtggattgttgggaatactgatgccattcgggaagatcgttactgccggggtactccagttgacggtcaccgggaatgactggttaattctggtgtcgatattaaggttacctaattggagggtgacgttgccggcaagatctttgatttcgattcctgaaatgttgacgacccccaagccaaagaaggggccgacggggaaagtcgtgttgaagttctgagccgggaacagggtgatgggcgagatggtgatggggccgacgctgataggtatggccgtaccgccaccaaaagcggggatcacgatgtccggaacgaccagcgggccgaggctgaaggtttggtgaatgttgagcgggatggtgggcaaaatctggatcggcaacacggtgatggggccgacgccgccgttgagctcgagaccaatggggatcgccggaatggtcgatccaccggagagcccccacaggccctcgtagtcaccccgccacagcacaccgttgctgaagttgcccgagatgaacgcgccggtgttgacattgcccgagttggcgatgccggtgttggtgttgccggtgttcagccagccggtgttgacgttgcccgggttgaagccacccgtattggtgttgcccgcgttgaagctgcccgtgttatagctacccacgttggccacacccgtgttgaacccaccaacgttgaacaacccggtactggccgtccccgcattaccgacaccggtgttgtagctgcccgagttgaataccccgaagttgccggtccccgaattgaagaacccaatgttgccggtgccggagttgaacaaccccagattaccggttcctgaattcaggcccccaatgccagtcaggttgtccccggtcaacccgatcccgatgttgttgctacccgtgttggcaaaaccgatgttgcccacacccaggtttgcgaggccgtagttgctgctgcccgcattgcccaacccaatattgcccatgcccggcggcaacccaagacccgagttgccgaacccgaagttggcgttgccgatattgccgaaaccgaaattcccgctaccggcgttggcagcacccaaattctgcgcaccgacattggctgcgcccaggttgaatatcccgacattgcccaacccgacgttgtaattaccgacattgcccaagcccgcgttaagcctcaacatcttcgcgggtccggcaaatagagcattgaggaacgcgccgacaccaccccccaacgcctgcgccggtgggctgaacgccggcaacgccgcggcagcagccgacgcgccggaatggtagccggccatcgccgccacatcggcggcccacatcaactcgtactcggcctcgacggccgcgatcgctgcggcgttctgccccagcaggttcgacatcgccaacgcccgcatcgccatccggttgaccgccaccgccgccggatccaccgtcgccgccaacgccgcctcaaacgccgccaccgcggcccgcgcctgcccggccaccgccacggcctgcgccgccaccgaacccaaccaccccgcatacggggccgccgcggccgccatcgccgccgccgccgcaccctgccacacccccgccgtcaggcccgacgtcacctgcccaaacgacaccgccgccgaccccaactcctcagccagcccatcccacgccgcggccgccgccagcaacgggctcgaccccgcacccgaatacatcagcacggagttgatttccggtggcagaactggaaaattcaaccgcccctacctctgccgctcacgatgcgttcacacctcatcgtctcaccacgacgtggtgagcgcgggcacttcgacaaactaatctgcaatatcccgatcgcgtacaaacgtgccgacatttgcggcgcattaatgcccatatcggcttgtatctcttgtagtgccgctttgacggggtggtggtcaggtacggtggcctcgggagaggctggagggctcgacgttttcggctgagtgtctgggcccgtgaaagagatcgtctgctccagctttgtctcctgaactgacccggtttagggaattggtggccaggttgcggaagtgcgcagcatcgacgtgtacctgggtgaggcatcgaatcatcgacaagcaccggagccgcgcgtgaactcccgccgcgttgtggtcggggatgatgtgggagaccggccggcagtgctgtgtacgaaggttctcccaccgcaacgagttcacgcacgacggtcggctgggtgggccctggaatacgtgaactcttcatcaacacaacatgattgacgatgaaggggagaacctccatgcacaacaacgctaacccgtgactgccgagaatccaggacggagcaggcggacgctggtcggaatcgacgcggcgatcacggcctgtcaccacatcgcgatccgcgatgatgtcggtgcgaggtcgattcgattcagtgtcgaacccacgctggccggactgcgcaccctcaccgacaagctcagcggttacgacgatatcgacgccaccgtggaaccgacctcgatgacgtggctgccgctcacgatcgctgtcgagaatgccggtgacaccatgcacatggccggcgcgcggcattgcgcccggctgcggggtgcgatcgtgggcaagagcaagtccgacgtcatcgacgccgaggttctcacccgcgccagcgaggtgttcgacctgacgccgctgacactgccgacgcccgcgcagttggcgttacgtcgatcggtgatccgacgtgccggcgcagtgattgacgcgaaccggtcctggcgtcggttgatgtcgttggcgcggtaggcgttccccgatgtgtggaccgcgttcgccgggtcgttaccgaccgcgacagcggtgctggggcgttggcccgacatccgcttgctggccggcgcaccgacccgccacgttgaccgccgtcatcgccgcgcacacccgcggtgtcgccgacaccccggcccggccgaggccatcaagaccgccgcaaccggctgggccgcgttctgggacgggcacctcgacctggacgcactggccgtcgatgtcaccgagcatctcagcgacctcaccgacgaccgatgcgcgcgttggtgatgccggtgaccaagaaggtgttgatcttgggtgactagtcaatggtggtggccagggtgagcagttcggggatctgcgagtcgatgcgccaggcaggaagcggtgtaggtgatggcgcgccaggtgggggtccccgccggtgcgcacggtcgacagcagggtgcgcagctcctctttggcgatccaggccgagagaatctgcgcgcgggggtcgacggcgttgatccgattccgcattttggcgaagcttttgtccgacaagcgttcccgggcggtcagcaagcgacgtcggttggcccactgcgggtcgatcttgcggccgcgccggtcgtggaacgcccaggtcacccggcggcgcaccgcggtcagcgcgtcgttggccagcgtggtcacatggaagtggtcgacgacgagcttggcgttgggcagcagcccgggcgtgcggatcgccgaggcgtaggcagcggcggggtcgatggccaccgtactggatgctctcccggaactgcggtgtgcgcgcttgcagccatgccagcaccgccgcgccgccgcggccttcatgctgccccataaacccctgatcaccggccaggtcgacgaacccggtatcccacgggtcgacccgtacccaccggccagtcttggcgcagcgctcccatctgggttttcctcgccgtgtctggtcaacgcccagcaccggggtgggcaacggctcggtcaatacccgtctcggcgtaggcaacaaacgcccgatgtgccgtcggccacgacacggcgtcagcctgggcgacctcggcccaccgagcgggccgcatccccgatcgccttggccatctgccgacgcagccgcagcgtgctgcggacgcgggcaggtacctgggtgatggcctcggtgaacggccccagcttgcagtagtcttctcggcatcgccagcgaattttgttccagcgcaccatgatgcggtcttcgccataaggtagatctttcggtgaggtaaccgcgtattccttcactgatatcgagaccacccccgcacgacgggcacgccgccgccgtcggctcatcggtgatcacatcgaccacccgggtcccgtcactgcggcgctcgacacgctcaacccgtgctcctggcagcccgaacaacactgtcgtagcgtcagacacagcccttggctccttcctcggcctgaatgcttcgcaacacttagacttcagaaggccaagggccctcagccgctaaacacgccgaccaagatcaacgagctacctgcccggtcaaggttgaagagcccccatatcagcaagggcccggtgtcggcgcaaaatttagcgtcgttgcgcccacaccagagttaccgccgcacacacggcgtgaccaccggcgtgcatttaagaatccgttagggcccgacgccggtgaagagcaagcccgacagttgctggccgacgttgccgaaacccgagacgacggccgcggtgacaacacccagcgcgccggtgttgtacacgcccgagatgccggcgccgcggttgaggatgccggagagctgggtgccgaagttggcgaagcccgacgccgacccgagcagcggatccgacatcgcgttgagcaatcccgacatgcccgcgccggtgttgctaaagcccgaaccgccgccagctccggtgttgaagaagcccgacgacggcagcgtggtcgagttcccgaaacccggcgccccgccgaacccggcgatcgggacgttgatcgggccgatagtggtgtcggcgtgcaggtccagcaagatccggtcgagaacgatggccgggatgtcgacgggcgggatgccattggacaacgcgaggcccagcgggagggtggggatcagggtgccgcccgggatggtgaaccccgggatggtcagcgacaccggcaggccgatgtcgatcgggtcgagggggatggtgaatcccgggaaggtcaccgtgccggaggggatggagatgggccccacaaagtatgccccttgcgtggacgttgcacccccgccgctagagggcgcgatccggattccggggaagaagctgggcttgacccaaatctctgaggttggtccggacgtgctggtgacggctccttgggagtaactgacgagcacgggcggggtcctgacggtaatggggttgacggtgatggagccgacatggacggcggggtcgaggcccaagtgaatggatggaacagagatgtccgggatggcgatcgggccgatgccaccgaccgcggcgaagccgaccggaatgggcgggatgtggatgggcggcagcacggtaatcgggccgatcccgccgctgacgtcggcgcccaccgcggggaacagcgggagggtgtagcccacggcgaagccggccaggccctggtagtcgccgcgccacaggatgccgttgctgaagttgccggtgacgaaggcgccggtgttgacattgcccgcgttggccaccccggtgttggcgttgccggcgttgagccagccggtgttgatgctgcccgggttgaagcccccggtgttggtgtcaccgacattgaagctgcccgtgttgtagctgccggcgttggccacaccggtgttgaaactgccggcattgaagagcccagtgctgcccgttccgctattgccgacgccggtgttgaagctgccggagttgaacaacccgaagttgccggtcccggtgttgaagaacccgacgttgccggcgccggagttgaacaaccccaggttgccggcaccggaatttaggccgccgatgccggtctggtagtcgccggtcagcccgatcccaatgttgccggtgccggtgttggccaacccgatattgcccacgcccacgttggccaacccccagttgttgccgccggcattgcccaaccccacattgcccaggcccggcacgcccgcggtcagacccgagttgccgactccgacattgccgtggccaatattgccgaaccccaggttgccggcgccgatatttccgaagcccaggttgtgcgcgccgaggttggccgcgcccaggttgacctccccgacattgccgaaaccggcgttgtggctgccgacgttggccaacccgatattcagaacggtcaccgggttcaccgcggacccgccggaaagcagccccgacagttggtggccgacgttgcccaggcctgagaccagcgccggggtccccacccccagcgtgctggtgttgtagatccccgagacacccgagcccaggttgagcacaccggaatgcagcgtgccaacgttggcaaaacccgagcccgcccccgccagcgcggtgtgcgcctggttccaccagcccgaggtgcccgcgccgaagttgccgaagcccgatcccccgcccgcgccggcgttgaagaagcccgacgacggggtgatggtgctgttcccaatgcccggggtgggcgggatgttgatcagcgggatgctgctggcgaggacatacaccgagccgtcggcgctcgccgcgatctcgggccaggtgatggccgggatgtccacgccgccggcgccggcggtcacgtccaggttcagcagcgaggtcgccgggaacgtcaaaccaccggggaagagggtgatcgcgttgacgctgccgggcacctggaagcccaacgtgatcgggccagtttcgagctgcggagtggtaaacgccccgctggacgcggaaatggtgagatggcttccgtcgctcgtgccggcgccgaaaacgagtgggccggtggcgtagggcgaaccgtcggccgatccgaatgaatagaaggttataccaaggccattagtgccttgagtccacatttcgaagggatctatcctcatctccgccccaaccgaggcgttgattatttgctccacaatgacactcaccggcggaatgcgcacggaccccacaacgatgcggaaggcggcgcttccggtgatgtttggggtgagtgcggggatgtcgatctgcggaatggtgaatgcgcccatcgcgacgtttccggtcaggtgcgcattaacggccggcaccgggatgggcgggaggaccacgggtccgaagccgccgtcgaggtgggcgtccacgatggtgatccggggcacgtcgaggctgtagaacaggctgaacaggccctcgtgatcaccccgccacaacaggccgttgctgaagttgcccgacatgaacgcgccggtgccgacgttgcccgagttggcgatgccggtattggtgtggccggtgttgaaccagccggtgttgatggtgcccgggttgaaccccccggtgttggtgtcgccggcattgaagctgccggtgttgtagctgccggcgttggccacgccggtgttgaagctgccggcattgaagagcccagtgctgcccgttccgctattgccgatgccggtgttgaagctgcccgagttaccgatgccgaagttgccggtcccggagttgaagaacccgatgttgccggtgccggagttgaacaagccgatattgccggcaccggagttcaggcccccgatgccggtgaggttgtcccccaccagcccgatcccgatgttgccggtgccggtgttggccaacccgatgttgcgcacgccctggttggcgaaaccatagttggcgctgccggcattgccgaaccccgtgttgcccaggccggccgcgccggcggtcagacccgaattgccgaaaccgatattgccgtggccgacgttggcgaagccgaggttgccggtgccgacgttgcccagccccaggttttgcgcaccgaggttggccgcgcccaggttaacgtccccgacgttgccgaacccgacgttgaagttgcccacatccgccaacccgatgttgaggatggggatctggttcaacgcggtcccggccgcagacacgcccgacagctgatggccgacgttgccgaggcccgacagcaccgccggcgtcccgagcggcaacacgctggtgttgtagatccccgagacacccgagccgacgttgagcacacccgagcccagcgtgccgacattcaacacccccgatcccgaccccgccagcgcgctcgccgcctggttccaccagcccgacaggttcgacccgacgtttccgaaccccgacaccccaccggcgccggagttgaagaaccccgacgacggggtcgccgtggtgttgccgaaccctggcgtcggcgggacatcgatgatcgggatgctgctgtcgggcacggtgagattcagcgccaggtgcagcggcagcgggtcgatcgtgtacccacccgggaaaatcgtgatcggatccagcgcgccggacgcatcgatcgttaacgggatggcgttcgtggggatcgtcaggccacccgcgaacaaggtgaaggccggcagaccaccgctgatgttcacgtccaacaggaatctcgtggtagcgatttgcggaatctcgaaacccggaatagatatcttgagctcgccggtcgttccggggccagggccggtgtgaatggtgatgccctgggtgggcgccgggaaggggtctccgaaattgggaatcgccgcggtcgacccgaggatccagtcctcgccttcgaagcgcatgctgatgagcggaagcgtcatggttgacccgggtgaggcggggatgtccagcggaatggttctcgtctgtgcgggaattgtggtggcgggcaccaggacgatgggatccatgtggatcgattcgtggatctctagcggtatcgcgggaacatcgacctgcgggatggtgaagggtccgatctcgacgatttcgtggacgtcgaacagcgacatgccggggatgtcgatctgctcgatgtggatggggcccaggttgagggtttcgttgaggtccagcagggtgctgccggcgatgtcgatgctgaaggagaagccgaccagcccgtggtagtcaccggtccacagcgccccgttgttgaagctgccggagttgaacgcgccggtgttgacgttgccggtgttgaacaggccggtgttggtgtggccggtgttgaaccagccggtgttgacggtgcccgggttgacgccgccggtgttgaagctgcccacgttgaggctgccggtgttgtaggagccggcattggccagaccggtgttgaagttccccgcgttgaacaacccggtgctggccgtgcccgcattccccacaccggtgctgtaactgcccgagttgaacagcccgaagttcccggtcccggtgttgaagaacccgatgttgccggtgcccgagttgaacaacccgaggttcccggtgcccgagttcaggccgccgatcccggtccgatagtccccggtcagcccgatcccgatgttgccggtgccggtgttggccaacccgatattgcccacacccacgttggccaacccccagctgccgctgccggcgttacccaaccccacattgcccaggccccccgcgcccgcggtcaggcccgcgttgccgaatccgaaattgccggcaccgatgttgccgaacccgaggttgccggtcccgacgttgcccaaccccaagttgctgccgccgaggttgccggcgccgacgttgatgttgccgacgttgcccgcacccaggttgaactcaccgacgttagccaaaccgaggttcaccccgccgacattgcccaaggccaaagcgttgccgatgtcgaggtgctgcagctcggcgatggccgcgtcgatgatctgatcgaacacggactcggcaggtgggaaggtgaggatcgcgatcaggccatcgatggacacccccgacatatggtcgccgaggttgctgaaccccgagatcaccgccggggtggtggcgtccagcgtgctcacgttgaacagcccggagatggcggtgccggagttcagcacacccgaggccagggtgccggcattgcccagccccgagagtgtccccaccagtgaccccgcgccggcctggttgagcaggcccgacacgcccgcacccaagttgccgatgcccgatccgccgccggcaccggtgttgaagaaccccgacgacggcatctgggtcgagttcccgaagcccggcgccgccgggatgtcgatgatcgggatgttgaggggtccggcactggtgcgaatgtcgaagcccagcgggatcgcggaaatggtggtgcctgtgatcgtgaccgccgggatgtccacggacgcatcgatcggcaccacttccgacattgaaatcccatcgatgaccgaggccggaatatcaacaggtatgcggataggaatcgactcactcaacgaaatcgcatccagggggatgggctcgatctccaggggcacaccgatcccggccaccacgattggctcaagatgaattggtccgagttggcccgtgataggaccaagaacgggcaggcctaacgtgaaatccatgggcggaatatcgatattcgagagcgtgatggggccgaagctgatgaagctaccgttattcttcagggcggacagcagggtggcttccggggcggtgaagccgacggtgacgacgccattgatgccgatgtggatggcggggatggggatgtcgggcacggtgaagctgtagtccgcgtcgccggtgatctgcaggtgcagcggcggaaggatcgtggtgtccgggatgacgatggggccgataccgccagtcgtggtgatgcggatcgggaattgcgggatcgtgatgccataggacaggccgaacaggccctcgtggtcgccgcgccacagcatgccgttgctgtcggtccccgacatgagggcgccggtgttgcgggtgcccgtattcataatgccggtgttgaaccagccggtgttgatgtcgcccgggttgaaaccaccggtgttggtatcaccgacattgaagctgcccgtgttgtacgacccggggttggcgatgccggtgttgaaattgccggcattgaagagcccagtactgccggttccgctattaccgatgccggtgttgaaactaccggagttgaacagtccgaagttgccggtgccggtgttgaagaacccgacattgccggtgccggaattgaacaatccgatattgccactacccgagttgaggccgccgatgccggtctggtagtcgccgaccagcccgatcccgatgttgcccgtgccggtgttggccaacccgatgttgcccacacccaggttggccagcccccagttgttgctgccggcattgctcaaccccacgttgcccaggccggccaggcccaccgccggacccgagttggcgaacccgacgttgccggcaccgatgttgccgaacccgacgttcccgctgccgagattgcccaggcccaggttctgcgcgccgatgttggccgcaccccagttgaggtcccccacattgcccaacccggtgttgaacgcgcccacatcggcccacccgatattgacaatggggctccggttgagcacggtcccatttgccaagaaccccgacagctgctggccgaggttgccgatgcccgagaccaccgccggggtgcccgctcccagggtgctggtgttgtaccacccggagatccccgagccgacgttcagcacgcccgagctcagcgtgccggcattggcaactcccgagcccgcccctgctaacacgtcgtgcccctggttccaccagcccgacgtgcccgcgccgacgttggcgaaccccgatccaccgccgccgccggtgttgaagaaccccgacgatggggccgtggtggtgttgccgaaccccggcaccgccggcacatcgatgatcgggatcgggatatcgccgatgaggatggtgccgtcgaaggtcgccggcacggtgtcgagggtgaacccgtcgggcaacagcgtgaacgcgtccagccccacggacagtccggtgaccccggcggaggcccgcggaaaggtcagcccacccgggaagaaggtgaacccgtcgttggcgacctccatacccaccgtcacgggggtttgcgcgggaatggtgaaaccattcgggaaaagcgtccacggggtggtgtccaagttgagggttaggggaattggtgtcggggtgaccaatatctgaccgctaaccgtgaggccgggcacaatgatgttctctaggaacaagacaccggcaacaacttggaacgcatcaatggtgataaatgggtcactgaggcggaacggctcgagaaaaagccctatcgaaccggcgagcgggtcaagagcgcgaatcggcgagatggtgtttgcggccaggtccacgcttccggtgatgctggcgatgggaagtgagggaatgctgatcggtgggacggtgaacggacccaggccgacggtggcgtcggtgatctcgacgtgcacggcgggtaccgggacgggcgccacatgcagcgggcccaccccgccgatcgcgtgcacggtgaccgggaattgggagatcgtgggcccgacgcggacgccgaccaggccctcgtagccgccccgccacaacaggccgttgctgtagtcgcccgtcatgaaggcgccggtgccgaaggtgcccgcgttggccaacccggtgttggcatgcccggtgttgaaccagccggtgttgatgccgcccgggttgaagccaccggtgttggtgtcgccggcgttgaagctgcccgtgttgtagtcaccagtgttggcgatgccggtgctgaagctgccggcattgaagagcccggtgctggccgttccgctattaccgatcccggtgttgaagcggccggagttcccgatgccgaagttgccggtcccggaattgaagaacccgacgttgccggtgccggagttgaacaacccgatattgccgatgccggagttcaagcccccgatcccggtccgatggtccccgaccagcccgatcccgatgttgcccgtgccggtgttggcaaacccaatattgcccacacccatgttcgccaagccatagttgttgatgccggcattgccaaaaccaacattgcccacccccgccgcgccggcggtcaggcccaagttggcaaaccccaggttgccatggccgatgttgcccaaccccaggttgccgtccccgacattgcccaggcccaggttgtgcccaccgatgttggccgcacccaggttgacgtccccgacatttccgaacccggtgttgaagttgcccacattggccaacccgaggttgccggcgagcatcgagcgcagcgtggttcccgccgccgacacccccgacagctgctggcccaggttgccgatgcccgacaccgccgccggtgtcccgaaaggcaacacgctggtgttgtagaaccccgagatccctgagcccaggttgagcacacccgagcccagggtgcccacgttgccaacacccgaaccggcccccaacagcgcgctcggcgcctggttccaccagcccgagctgcccgcgccgacgttgccgaaacccgacaccccacccgcaccggagttgaagaatcccgacgacggggccgtggtggtgttccccactcccggcgccgccgggatatgaaggccctggatcgtgatggggccgatcgtgaccccgccccccacggtcagggggatgcgatcgatcgtgatcggcggggtgctgaacccgtcgatctggccctcgatatcgatcgacaacggcaacggctgcgcgggaacactaaatcccgggatggtaaagcccgggttactgatcgacacactcaccagcaaccccaaaggattatcgggagcactgatgccattcgggaacagcgtgatcggaggggtatcccatctgatcgttaaatcaatctgtggattggtgggtccgggaatggtggtgtcgataacgatagggccgataaagctgacaagctgaccgttagaatcaaaggtttggatttgtggaattgtgattttccctaaactgaaggtgggaaagggcaattggttgacaaatgtctgttgggcaaacagggtgatgggtgtgatggtcagcgggccgatgttgatgggtatgccgataccgccgccgaaggcggggatcacgatgtcgggaaccaccagcgggcccaagttgacggtttggtgaatgctgagcgggatggtgggcaggatcgggatgggctggatggtgatcgggccgatgtcgccgttgagcaccaggccgatgggaattgcggggatcgacgagccggcggagacgccgaacaggccctggtagtcacccacccacagcacgccgttgttgaagttgcccgagatgaacgcgccggtgttgacgttgcccgagttggcgatgccggtgttggtgttgccggtgttcagccagccggtgttcacaccgccggggttgaagccaccggtgttggtgtcgccggcgttgaaactgccggtgttgtaactgcccacgttcaccacgccggtgttgaaattgccggcattgaacaaccccgtgctggccgtccccgcattaccgacaccggtgttgtaattacccgagttgaacaccccgaagttcccggtccccgaattgaagaaccccacattcccggtgccggagttgaacaacccgatattcccggtgcccgaattcaggcccccgatacccgtcaggtggttgccggtgagcccgacgccgacgttgttggtgccggtgttgccgaaaccgatgttgcccacacccaggtttgcgaaaccatagttgctgctgcccgcattgcccaacccgatattgcccaagccggccaggcccgcccccagaccggagttgccgaacccgacattcccgttaccgaggttgccgaacccgacattggtgccaccggcattcccgaaacccagattctgcccacccacattgcccgcgcccaggttgaacaccccgacattgcccaacccgacgttgtaattgccgacattgcccaaacccgcattcaggctcagcgccttcgcagggctggcgaacagggcggtaaggaacgcgccgacacctccccccagcgcctgcgccggtgggctgaacgccggcaacgccgcggcagcagccgacgcgccggaatggtagccggccatcgccgccacatcggcggcccacatcagctcgtactcggcctcggcggccgcgatcgccggcgtgttctgccccaacagattcgacaccgccaacgccaccagccgcgcccggttggccgccaccagcgccggatccaccgtcgccgccaacgccgcctcaaagacccccaccaccacccgcgcctgcccggccaccgcctcggccgcggccgccaccgaacccaaccaccccgcatacggcgccgccgcggccgccatcgccgccgccgccgcaccctgccacacccccgccgtcaggcccgacgtcacctgcccaaacgacaccgccgccgaccccaactcctcagccagcccatcccacgccgcggccgccgccagcaacgggctcgaccccgcacccgaatacatcagcacggagttgatttccggtggcaacaccggaaactccatcacccattccccttcccagcccgacaccaatccccaccgacaccccccacatgacgtgtcgacgccccgataattttgctcgcattgccaacggcccaagaacgattccccgataatcgcgggtactgggtgcactttgcacagacgccgcagcaaaatgcacatatgccctgtccagaccggcgagcggcagggcgtcatctgccctgacacttcgactgctggcggagtccgcgagcatgctcaccgccgcggcgtgcgccgaaccggcagcgccggcaaatccatgaccccagcctgttcttgggtcactgcgacgttcacttttaagcgcgaccacgtaaggttgggcaaagttcccaagcgtttcacagtgtcagtgcacagtgcgcacctgattaccaaaaccccgaacctcactcgaaagccgagagcgggtaaaagtcgttcagcgacctgtctggtagagaaatccagacccgagtacatgatccggtcgggatcgtacttgcgccgcactgtggtcagccgcgacaggttcgcgccgaagtattgtgacgccgcggcgttggcctccaggtagttgacatagccgccgaccgaaaagtgttgcaccgcgtggtgtgcgtcgctcagccatttgttggccgtcgccacctggccgtcgctgggggtgttgacataccactgcaccacagcggactggcggcaccagggaaatgccgagccctccgggtccatgtcgcccaccgcgccgcccagcgaatcgatcagagccgacgcgcggcccgcagcgggtggccatgttccgatggcggcgacgatggcttgggccgcggccggattcgtcgtcccgatgacatcggatccagccacgaagccctccggcggataggtcgtatggccgccggccagatacctcaccaggtccatacggcgcagcgtcttgtgctcaactccactgggttgcactccaaccgcggacttgatcgcatccgcgacagccgcgccggaccgcgccgggcagctcgccagcacatgacaattgcctccggatgagctgaccgcggggtcaaccagaccccacgtggtgcggtcggccccggccagccacgtctgtcagccgaccagcacctgcgcggccgcagacggcgcgaaatcgacacggacgacatcgcagtccgcggtggggaacctcgcgaacgtcatcgatgtcgtcaccccgaagttgccgcccccgccgccacgaagcgcccagaacagctccgcgtggtcgtcggcagacgcgctcaccgcatcaccgccgggcaacaccaccgtcgccgacttgagcgcatcgcaggtcaaccccgcatggcgagaatcggcgcctaacccgccgcccagggtcaaacccgccacacccacggtcgggcagctgccggtcggaatcgcccggctctcaccggccaacgcttgatggaccgcatagagatcggtcgcggccgacaccgtacgtttctcgtggcgctgtcgaaatgcaccccgcccggtaggcccagcagatcgagcaccatggcgccattggccgacgaggcgccgatgtaggaatgtccgccgccgcgcacagcgatcttgagcttgctggccgccgctacgaaaccgccttccggacgtctgcctgcgaggcgaccgtcaccaccgcggccggattcaagccgctgtagttcgaattgaagatctgctttccgctcgtgaacgccctgccgttggccggcagcagcacctgcccgcctatcgatgaggccagactggcccacccatcacccggtgttgcgcgcgccaatatcgtcgggaagaccgccgacgtcgccggcgctccgacggcgccgcgaagaaacgtctggcgagacatcacgaccgcgatcgtgtcgtatcgagaaccccggccggtatcagaacgcgccagagcgcaaacctttataacttcgtgtcccaaatgtgacgaccatggaccaaggttcctgagatgaacctacggcgccatcagaccctgacgctgcgactgctggcggcatccgcgggcattctcagcgccgcggccttcgccgcgccagcacaggcaaaccccgtcgacgacgcgttcatcgccgcgctgaacaatgccggcgtcaactacggcgatccggtcgacgccaaagcgctgggtcagtccgtctgcccgatcctggccgagcccggcgggtcgtttaacaccgcggtagccagcgttgtggcgcgcgcccaaggcatgtcccaggacatggcgcaaaccttcaccagtatcgcgatttcgatgtactgcccctcggtgatggcagacgtcgccagcggcaacctgccggccctgccagacatgccggggctgcccgggtcctaggcgtgcgcggctcctagccggtccctaacggatcgatcgtggatgcgatgtagaccatggccgccgcgaccgtcacggtcgtcacgaaatcgatccccttgctgcgcaccaccaacaggccggcccgttcctcggacaacaccaaccgcagcaccgccgccaccccaacgccgataccgatcagcagcgcaccacggcgccagaagttagcccccgccagcacgaaccccaccgcgaagatcgacccaaccagcaggatcggccactgggcgccaacagtgcgccggaaaacggccctcacggtcatcgccgctcagccagctccacgacattggtcaacaagaacgcccgggtcaacgggcccacgccgcccggattgggtgacacgtggccggcgagctcccacacatcgggatgcacgtcgccgaccagtccgtcatcagtgcggctgacgccgacgtcgattaccgcggcacccgggcgcaccatgtcagccgtcaacaggtgcgccaccccgaccgcggccacgacgatgtcggcctgccgggtcaacgcgggcaggtcgcgggtaccggtgtggcacaacgtcaccgtggcattctccgagcgccgggtcagcaacagccccagcggccggcccaccgtcacaccacgaccgataacgaccacatgcgcgccggcgatcgagatgtcgtagcgccgcagcaggtgcacaatgccgcgcggagtacacggcagcggcgccggggtgcccagcaccagccggcccaggttggtcgggtgcaacccatcggcgtccttggccgggtcgacgcgctccaacgccgcgttctcgtcgagatgcttgggcaacggcaactgcacgatgtagccggtgcagtcggggttggcgttcagttcgtcgatggtctcattcagcgtggcggtgctgatgtcggcgggcaggtcgcggcgaatcgacgtgatgcccaccttggcgcaatcagcgtgcttaccgcgcacgtaggcctgcgaccccgggtcgtcaccgaccaggatggtgcccaagccgggcgtgcggcccgccgcgtccaatgcggccacccgctgcttgaggtcaccgaagatctcgtcgcgggtagccttgccgtccagcatgatcgcgcccacgccagccagtctggcatgcgtgtccgcggtgccgatggcgacgacccgctcacgcgcccaccgtacggacaacttgtaccattgtggtacagattatccgtacatctttctaagagaggacgcatgagcatcagtgcgagcgaggcgaggcagcgcctgtttccactcatcgaacaggtcaataccgatcaccagccggtgcggatcacctcccgggccggcgatgcggtgctgatgtccgccgacgactacgacgcgtggcaggaaacggtctatctgctgcgctcaccggagaacgccaggcggttgatggaagcggttgcccgggataaggctgggcactcggctttcaccaagtctgtagatgagctgcgggagatggccggcggcgaggagtgagaagcgtcaacttcgatcccgatgcctgggaggacttcttgttctggctggccgctgatcgcaaaacggcccgtcggatcacccggttgatcggagaaattcagcgtgatccgttcagcgggatcggcaaacccgagccgctccaaggtgagttgtcgggatactggtcgcgccggatcgacgacgaacaccggctggtgtatcgagcgggcgacgacgaagtcacgatgctgaaggcccgataccactactgatttgggggctggtggtattccggcgggcttaagctccccatgtggctcccggcagctgcgaagccccggacgtgttcaacccggccaaactcggtccgctcacgctgcgtaaccgggtcatcaaggccgccaccttcgaggcccgcacacctgacgcgttggtgaccgatgacctgatcgagtaccaccggctgccggccgcgggcggggtcgccatgaccaccgtcgcctattgcgcggtctcccccggcggacgcaccggcggcaaccagatctggatgcgcccgcatgcggtgccgggactgcgccggctcaccgaggcgatacacgccgagggggcggcgatcagcgcccagatcggccacgccggcccggtggccgacgcccgctccaaccaggcgaccgcgctggctccggtgcggttcttcaatccgatcgctatgcggttcgcccagaaggcgacccgcgaggacatcgacgatgtgctggccgcgcacgcccatgccgcccggctggccgtcgacgccggcttcgacgccgtcgaaatccatttggggcataactatctggcgagcgcgtttctgtctccgctgctcaaccggcgtgatgacgagttcggcggttcgttgcagaaccgggcgaaggtagctcgcggattggtgatggccgtgcgccgcgccgtccggcagcaggtcgcggtgaccgccaagctcaacatgaccgatggcatccgcggcggcatcacagtcgacgaggcactgaccaccgccaggtggctgcaggacgacggcgggctagacgcgatcgagctcaccgcgggcagctcgctggtcaacccgatgtatttgttccgcggcgacgcgccggttaaggagttcgccgccgcgttcaaaccaccgctgcgctggggcatccggatgaccggccataggtttttccgcgaatacccctaccgcgatgcctatctgttacgcgaggctcggttgtttcgcgccgagctgacaatcccgctgattctgctgggcggcatcaccaaccgaacgaccatggacctggcgatggccgaagggttcgagttcgtcgcgatggctcgggcgctgctcgccgagcccgacctggtcaatcggatcgcggccgaaggcagccaggtgcggtcggcgtgcacacactgtaatcagtgcatggccacgatttatcgccgcactcactgtgtggtcaccggggctccatagcgtccagattgacgccaccgtgaagaagtgcaacccattgtgccggaaatccggttgacttccccgcgcgaatccggctcaggcactattgaccgcgcgcagcataatttgaaccgatgagtcgaccccatccaccggtgctgacagttcggtccgatcggtcgcagcaatgcttcgccgcgggccgcgacgtggttgtcgggagtgatcttcgtgccgacatgcgcgtggcgcacccactgatcgcccgtgcgcacctgttgctgcgcttcgatcggggcaattggatcgcgatcgacaacgattcgcagagcgggatgttcgtcgacggccagcgggtgtcggaagtcgacatttatgacggcctgactatcaacatcgggaagcccaccgggccgtggatcaccttcgaggtcggccatcaccagggcatcatcggacggctgtcacgcaccccgtcgtcgcgtcccggctcaccgatctagccccctgccaagcacagcccgtgcgccgccgcaaaggccacggcttggtcgacgtcgacacgcgcacccaccaacgacgcggtccgccacaataccgggtccacggtcgcgccccgcaagtcggcgtcatccagccgggcgcccgtggtacgggcaccactgaggtcggcgccgcgcagcacgcacttgcgcaagtcggtatccaccaggctggtctctcgcaaccggcagccggtcaagttgagaccacgcagatcatttccgccgagcacggcgagcgtgaaatccacgtcgtccaacgtcagcggccgcagccggcaagccacgaagaccgagcccaacatgctgcactgggcaaatgtgctgtgccacagtgtcgtccgttcgaaggtgcaattacgaaacgccgaccctcggtgttgtgactcggccagattcacgccgctgaaatcgcattcgctgaacatcgcccgttcggtgtgcaggcggctaaggtcctcgtcgcggaagtctcgaccggtgaattcgcaatcaacccactgctgcaacgcttttcaaccgcccgcaggagacagggtggccagcgcgtattcgctcaccgcgatcagtgcatcggtcgccgacctgcgattgcgggcgtcaacattgatcaccggaatgtgtgcgggcagcgtcaacgcgtcgcgcaccgcgctaaccggataccttggcgcgctgtcgaactcgttgatggcgatcaagaacggcaggttgcggtgttcgaagaagtcgaccgccgcaaagctgtcctgcagacgccggcagtcgaccaagacgatcgccccgatggcaccacgcaccaggtcgtcccacatgaaccagaaccggcgctggcccggggtaccgaatagataaagcaccagatcctcgcccaaggtgatgcggccgaagtccatcgccaccgtggtgctccgcttgtcgggagtggcctccagcatgtcgacgccggcggaggcatcggtgaccatcgcttcggtgcgcaacggcatgatctccgaaacagcgccgacgaatgtggtcttgccggacccgaatccgcccgcgatgacgatcttcgtcgacgcggtgccggatgcctcagagtgctttaaggccacgcagggtccttcctatgagttcgtggcgttcgtcgcgggtcgatcggtcggtcaaggtcgcgtgcacccgaaggtaaccggacgtgaccagatcaccgaccagcacacgcgccacacccaccggcaaatccagccgagccgagatttccgcgaccgacggactgccaatgcacaattgcaagatcctgcgtcgcatgtcgtaggccggccagcggccagccggtcccgccggcagggtctgcaccggcgcctgaagcggaaggtcgacgtcggtaccggtacgtccggcggtcagcgtgtaggggcggaccaggcccgccttcggtctatcgccggcaggattgaacaacgccgcccacccgctcgacaaggatggccatctcataaccgatctggccgatatcgcatccggtcgcggccagcgccgccagcgccgacccgtctcccacctgcatcaacagcaggtagccgttctgcatctcaaccaccgactgcagcacctgcccgccgtcgaacagttgcgcggcgccgccggccaggctggccagcccggacgtcaccgcggccaactgatcggcgcgttcgcgtggtagatgttcgctggccgccacgggaagcccgtcgaccgacaccagcaatgcatgggccaccccgggaacctcgcgggcgaacttcgacaccagccagtcaagcgggctgtccggcaagcgggctttcattgctgattgggtccctgactgctctcgcgggcatgcgaccgcccggtgcgcacgccgccgaaatggctgctgatggaggcacgaaccgcgtcggggtcgcgtaccgcagccgcgtgccgcggcgctcggccgggatgaagtccgccgttggatgctagcgctgcacccggatgctcccgatcgggtccctcaggcaccgccgcccccggcactaaccgggccccgggttcgcgcaccggcaggccgtagtccgtgcgggactgcacgggcttgtccgcggcctcggcggccgccgaccagccgtggtcccacaccgacttccagtccagatcggggctgtgggccagctcgtgcgggtcacccaccatctcggagagcatccgccggtagatgacgtcgtcatcaaccgggcccgccggtggcgcgggtttggcgggcggcggcgccggtcgcggttctggtgcgggcggttgtttgggctcctgttgaaacctatcctcccaccagggtgttttcagctcgcgccgccgctgctgcatcggctgggccgggacgtcggcgatgccactggaccccggggtacggcgcgggagcaacgtgaccggtggtagcggcccgatggcggcgggaacgtccgtcggatcggccgccgcgggttcaggacacggcggcttgatcgcaaatacccgcggctttggcggctgcgctggggccgtcccctcgagcacggctagcggcaggtagacctcggcggtggtgccggtgccctgttcaccggtcaccggaccgcgcagcccgactcggatgccgtgccgaccggccagccggccgactacgaacagacccatgtgccgggcactatccggggtgacctcaccgccggcccgcagccgcatattggccatccgccgatcggcatcggtcatgcccaggccggaatccgagattcgcagcagaacactgccttcgctgccgattgcggcggcaacccgaacgggtgtggtcggtgacgagtagcgcaacgcgttgtcgatcagctcggcaagcagatgaatgacgccaccagccgctgcgccgactaccgcacagtcgggtaccctcgcgatgtcgacgcggcgatagtcctcgacctctgacacggcggcgctgatcacggttgacagcggcaccggctcgcggtggtcacgggtaatctgcgcaccggccagcaccagcaggttggcgctgttgcggcgcagccgggcggccaggtgatcgagccggaaaaggctgtcgagtcgggcgggatcctcctcgttgcgctccagttggtcgatgaccgacagctgctggtcgaccagggaacggctacgccgcgacatggtctcaaacatctcgttgaccagcagtcgcaaccgcgtttcctcgccggccagcaacagggcccgggtgtgcagctcgtcgaccgcatgcgcgacctgaccgatttcctcggtggtgtacaccgccagtggctcggggatcggctcgtcgccggcgcggaccgccgcgatctcgccgtcgagatcggtatgagcaaccttgagcgccccatcacgcagtacccgcatcggcccgaccagcgtgcgcgccaccaccaacacgacgacgatcgcggtcgcgatggcggccaacaccagcacggcgtcgcgaatcgcggcatcccgccggtcggtggcctggctttgcaccgacttcgtcaccgcctcggtggtgtcggtgatcacctgctcggcaatgtcgcgggtgatctgtatcgagtgcagcagctctgggttgttgaccagtgcaacggccggatcggacatgatcgccatcctggtcaccatttgctgctgcaggttcttggtgtccggcgagcctgcaccgagcgccgcgctcatcccgaacagcgtcgagggttcggtgccggccagggtaaccatcgcgctgcgcagttgcggctcggcaaggtcggcgccgcgagtcaccaggatctcctgcatcgtcatctgcccgcgggcgccaacggctcggctcaaaccctgcacctgggttcggatttgctcgctgtcaacccgcaccgacgcgtcaatcacgttctgggccgtcaacagcagcggcgcgtaggcggtgacccgatcccgcaagccgatgctgtcggccagcaccttatccagcagcgcctgaccgccgttgagcagcgtgttcactcccgaccgcacgtctgcgatgacgtcggtgtcggccagtcgcgtctgcagctcgtacttgcgggcggtgaagtttttctgcgccccctccacatcgtgtccggtcgagctggccagcacggcgacgtccagcgccgacatgtatttcgtgatcgcgggtatcatttcggcgcgcgcggcgaccagccgcaggccgctggtgctggccatcgcagcctcgacccgcaatcctgctaacaccatcgccactaccagcggcagaagcgcgatcgtgaacactttccatcggaccggccagttgcgcggcgaccaggacggcgggcgttgctgaggtttgccgcgggccggttgagccggggcggaaatatcagaagcggccgccgcgaccgggatggtcgggcgggcgaacatggtcacgtggccgcggccgtgccaccggccgcacccttatgcagcgctcgaaaaacggagagactcatagacttcctgctcatgccttgatgccgtccgccccagccggccgggcgcggacgtaaacaactggcaatccgacgagtatgacagcccacggccgaggtctccaccgctgtcaccgagcatgtcaccggacaggccggcaaacgggcaccgggcgctttgccatgatcggcggatgttccggctgctgttcgtatctccgcgtatcgcccccaacaccggcaacgccatccggacgtgcgccgcaaccggctgtgaactgcatctggtcgagccgctcggcttcgacctgtccgaacccaagctgcgacgggccgggctggactaccacgacctggcctcggtcaccgttcatgcctcgctcgcgcacgcctgggaggcgctgtcgccagcgcgggtgttcgccttcacggcgcaggcgacgacgttgttcaccaacgtcggctaccgggccggtgacgtgttgatgttcgggcccgaacccaccggcctggacgaggccaccctggctgatacgcacatcaccgggcaggtgcgcattccgatgctggcgggccggcgctcgttgaacctgtccaacgccgcagccgtcgcggtctacgaggcctggcgtcagcacggctttgccggggcggtctagtcgcgaccaaggtgacaccgaaccagccggtatgcgcacaacgaagctcatcggcgtcgggcgccggacaggagcacccaaccggtgacagcacaccgaacgcaacccgggcgatcacatcggaccacgacatcccgggaaaatcgatgccggtgagcttgcgcgtccagctaccaccaccgtcagcggtgacaccttcaccggcaacaacggcagcgcaggcgcagctgtcagcggcggcgcgcagcgaaggcgttgcggtcaatgaatctgccgcaaaccccacgcccgttggcccatattgcgctagcatccgggtgttgtgatctcgcaggttgcgtgctggcagcctgggggtgggttgtgatgtcgtttgtcgtagcagtcccggaggcattggcggcggccgcgtcggatgtggcgaacatcggttctgcgctaagtgccgcgaatgcagcggcagccgccggcacaacggggctactggcagccggtgccgacgaggtctcggccgccctggcgtcgctgttttccgggcacgctgtgagctaccaacaggtcgcggcccaggcgacggcgttacacgatcagtttgtccaggccttgaccggtgccggcggatcgtacgccctcaccgaggccgccaacgtccagcagaatctgctgaacgcaattaacgcgcccactcaggcgctgttggggcgcccgttaattggcgacggggctgtcggcaccgccagcagccccgacgggcaagatggcggtctgctgttcggcaacgggggcgccggctacaacagcgccgccacgcccggaatggccggcggcaacggcggcaacgccggattgatcggcaacggcggtactggcgggtcgggcggtgccggcgcggccggtggcgccggcggcagcggcggctggttgtacggcaacggcggaaacggcggcatcggcgggaatgcgatcgtcgcgggcggtgccggcggcaatgggggcgctggcggcgccgccggattgtggggcagtggcggcagcggcggccaaggcggcaacggtctgaccggcaacgacggcgtgaatccggcccccgtcacaaaccccgcgctaaatggcgccgccggcgacagcaatatcgagccgcaaaccagcgtcctgatcggcacccaaggcggtgacggcacgcccgggggtgctggcgtcaacggcggcaacggtggcgcgggcggagacgccaatggcaaccccgcaaacacctcgatcgccaacgcaggcgccggcgggaacggcgccgccggcggtgacggcggtgccaatggcggtgcgggcggcgccggcgggcaggccgcgtccgccggtagttccgtcggcggtgacggcggcaacggcggtgccggcggtacgggcacgaacgggcacgccggcggtgcgggcggcgccggcggtgccggtggtcgcggcgggtggctggtcggcaacggtggcaacggtggcaacggtgccgccggcggcaacggcgccatcggcggtaccggtggtgccggcggcgtccccgccaaccagggcggtaacagcgccctaggcacccagccggtcggcggcgacggcggcgacggcggcaacgggggcaccggaggcaccggcgggcgtggcggcgacggcggatccggcggcgcgggcggcgcgagcggttggttgatgggcaacggcggcaacggcggcaacggcggcaccggcggctcaggcggtgtcggcggcaatggcggcatcggcggtgacggcgccggcggcggaaacgccacgagcacgtcgagcatccccttcgacgcccacgggggtaacggcggcgctggtggcgacgctggtcacggcggaacgggcggcgacggcggtgacggggggcatgccggcaccggtggacgtggcgggttactggccggccagcacgccaactccggcaatggcggtggcggcggtaccggcggtgccgggggcacccatggcacccccggcagcggcaacgcaggcggcaccggcaccggtaacgctgacagcacaaacggcgggccaggcagcgacggcctcggcggggacgcgtttaacggcagtcgcggcaccgacggcaaccccggctaattaccagccgttccagtgcgtcacgctctcggccggcagccgcttggccggccggaagtcgatgccttgtgtgtaggcgatcggaagcagcccgccttggctgtattcgtcgtagggaatgccgagcacgtcggccaccttgtgctcgccgttgtcgagcaggtgcagcgtcgtccagcacgaacccagcccgcgggagcgcagcgccaggcagaagctccacaccgccgggaacagtgaggcccaaaacgacacgccacccaccgccgactcgtcttcccggcctttcaggcaggggatcagcagcaccggcgcccggtgcatgtgttcggcgagataggtcgccgaatcgcggacccgccccatccgctcgccgcgggtgtcgccgtcggggtactcgggcgccggcccgctgaggtagccccgggcgttggccaggtagacgtcggcgatcgcctttttcttggcggcgtcctcgacgaacacccactgccagccttgggaattggaaccggtgggcgcctgcagcgccagctcgaggcattccatcagcacgtcgcgtggcaccggcttgtcgaaatcgagacgcttgcgcaccgagcgggtagtggtcaggacctcgtcgacggacaggttgagggtcatgtgggcaggctaccgttgggccatgagcgtcgaactgacacaagaggtttctgccaggctcacgtccgacctttacgggtggttgaccaccgtcgcccgatcggggcagccggttccgcggctggtgtggttctacttcgacgggaccgacctgacggtgtactccatgcctcaggcggccaaggtcgcccacatcaccgcccatccgcaggtcagcctgaacctggactccgacggcaacggcgccgggatcatcgtggtgggcgggacggcggcggtggtggccaccgatgtcgactgccgcgacgacgcgccgtattgggccaagtaccgcgaggatgccgcgaagttcgggctgaccgaggcgatcgccgcctacagcacccggctgaagatcaccccgacccgggtgtggacgacgcccacgggctgagcgggctggcccccgctcgccgccagagtgaaatccacgacgcgtttgcggcgtgtcgcgtcgcccgtttcactgtcggcgcagaggttcaccggaagtcgcgcgagcgcgcgccgaccgccagggtgaggcggcccatccgttcggcgacgacggtgattgcgccgctggcgttttggacctggccgcggatcagcagcgccggcgccgtgtgcgcgagcttgcggtgtcgcgcccacaccccgggcgtgcagagcacgttgaccatcccggtctcgtcttcgaggttgatgaacgtcaccccctgggccgtggcgggtcgctgccgatgagtcaccgcgccggcgatcagcacgcggtcgccgtcggacaccgatcccagcctctcggcgggcagcacccccatcgcgtccaggtccgcccgcaggaactgggtcggatagctgtccggggagacgccggtggcccacacgtcggcggcggccagctccagctcgctcatccccggcagcgccgggatgtgcgacgacgagcccaccccgggtaaccggtccggccggcccgtggccgcggccccggccgcccacagcgcctcccgccgagacatgccgaagcagcccagcgccccggccgtcgccagcgcttcgacctgcggcacggaaagctgcacccgcgacgtcaagtccggcagggaggtgaacgggccgttggctgttcgctccgcgaccagcttctcggccagctcggcgccgaggtagcggacggcgcccaagcccaaacgcacctccgttccggcgttctcacacgtggcgtgcgccaggctggcattgacacacgggccgtgcaccgccacgccgtgccggcgggcgtcggccaccagcgactgcggcgaatagaaacccatcggctgggcgcgcagcagcgccgcacagaacgccgccgggtggtgcagcttgaaccacgccgagtagaacaccagcgacgcgaaactcagtgcgtggctctcggggaagccgaaattggcaaacgcctccagcttttcgtagatccggtcgatcacctcgtcgggggcgccgtgcagcgcgcgcatgccgtcgtagaaccggccgcgcagccggcgcatgcgttcggtggagcgtttggaccccatggcgcggcgcagctggtcggcctcggcggcggaaaagccggcgcagtcgaccgccaactgcatcagctgctcctgaaacagcggcactcccagcgtctttcgcaatgccggcgccatcgacgggtgctcgtagatgaccgggtcgacgccgttgcgccgccggatgtaggggtgcaccgatccgccctggatgggcccggggcggatcagcgccacctccaccaccaggtcgtagaacactcgcggcttaaggcgcggcagggtggccatctgcgcacgtgactccacctggaacacgccgacggaatcggcgcgggccagcatctcatacaccgccggctcggagaggtcgaggcgggccaggtccacctcgatgcccttgtgctcggccaccaggtctttcgcatagtgcagcgccgagagcatgcccagcccgagtaggtcgaatttcaccaagccgattgccgcgcagtcgtctttgtcccattgcaggacgctgcggttggccatgcgcgcccattccaccgggcacacgtcggcgatcgggcggtcgcagatgaccatgccgccggagtggatgcctaggtgccgcggcaggttgcggatctgggtggccaggtcgatcacctgctcggggatgccgtcaacgtcgtcggcctgcccggtccagtggctgacctgcttgctccacgcgtcctgctggcccggcgagaagcccagggcgcgggccatgtcacgcaccgcgctgcgcccccggtaggtgatgacgttggcgacctgggcggcgtagtcgcggccgtatttgtggtagacgtactggatgaccttttcgcgctgatccgactcgatgtcgatgtcgatgtcgggtggcccgtcgcgggcgggcgataagaagcgctcgaacaacagctcgttggccaccgggtcgacggcggtgacgcccagggcatagcagaccgcggagttggccgccgatcccctgccctgacacaggatgtcgttgtcccggcaaaaccgggtgatgtcgtgcaccaccaggaagtagcccggaaatctcagttgggcaatgactttcagctcatgctcgatctgggagtacgcccggggcgcgctcttgggcggcccgtaacgctcgcgggcgcccgccatgaccaacgaccgcagccagctgtcctcggtgtgcccgtcgggaacatcgaacggcggcagccgcggcgcgatgagctgtaggccaaaggcgcaccgctcgccgagctcggcggccgcggtcaccgcctcggggcaccacgcgaacaaccgggccatctcctccccggaccgcaggtgcgccccacccagcggagccagccacccggccgcggagtccagcgaccgccgggcccggatggccgccatcgccatcgccagccgcccacgtgacggatccgcgaagtgcgccccggtggtggcgacgatgccgacaccgaagcgcggcgccagtccggccagcgcggcgttgcgttcgtcgtcgagcgggtgaccatgatgggtcagctcgatgctgacccggctgggggtgaaccggtccaccagatcggccagcgcccgctgcgccgcggccgggccaccctgggaaagcgcttggcgcacatggcctttgcggcagccagtcaggatgtgccagtgcccgccggcggcctcggttagcgcgtcgaagtcgtagcgcggcttacccttttcgccgccggccagatgcgccgccgccagttgccgcgacaaccgccggtagccttccgggccgcgggccaacaccagcaggtgcgggccgggcggatccggccgctcggtgcgagccgtggcgcccagtgacagctcggcgccgaagaccgtgcgcacgtcgagttccgcggccgcttcggcgaaccgcaccgccccgtacaggccgtcgtggtcggtcagcgccagggcacacaggcccagccgggcggcctcctcgaccaactcctcgggcgtgctggccccgtcgaggaagctgtacgccgaatgcgcatgcagctcggcatacgcgacggacgatccgacccgttcccggcccggcggctggtacgccccgcgcttgcgggaccgtgggacgtccccatccgcgtcgaacgccggcaccccggcatggcgcggcttgccgttaagcacccgttccatttccgcccagctcggcggcccgttgctccaccccacattccacagtatatcgaacaattgttcgatacagcgcagttgttcagcacatcttcacctgcgaaacatgttcttaaccgtttgggccttctgcttccggtgcggtccggcggacacttatacctggggtcgcaaaacgacggtggggacttgtcatggcacaactgacggcactggatgcgggttttctcaagtcccgcgatccggagcggcacccgggcctggcgatcggcgcagttgccgtcgtcaacggtgccgcccccagctacgaccagctcaaaacggttctcacagaacggattaagtcgatacctcgatgtacccaggtgttggcgaccgagtggatcgactatccgggattcgacctcacccagcacgtgcgacgggtggcgcttccccggcccggcgacgaagccgagctgttccgggccatcgcgctggcactggagcgtcccctcgacccggaccgcccgctgtgggaatgctggatcatcgaaggcctcaacggcaaccgctgggcgatcttgataaaaatccaccattgcatggccggcgccatgtcggcggcccacctgctggccaggctctgcgacgatgccgacggcagtgccttcgctaacaatgttgatatcaaacagattccgccgtatggcgatgcgcggagctgggccgaaacgctgtggcgaatgtccgtcagcatcgctggcgccgtctgcacggccgcggcacgcgccgtcagctggccggcagtgacgtcaccggccggcccggtcaccaccaggcggcggtaccaagcggtgcgcgttccccgcgacgccgtcgacgccgtgtgccacaagttcggggtgaccgccaacgacgtcgcgctcgcggccatcaccgagggcttccgaacggttctgctgcaccgcggccagcaaccgcgcgccgactcactgcgtaccctggagaaaaccgatggcagctcggccatgctgccctatctccccgtcgagtacgacgacccggtgcggcgattgcgcaccgtgcacaaccggtcacagcagagcggccgtcgtcaacccgacagtctgtcggactatacgcctctcatgttgtgcgccaagatgattcacgcgctagctcggttaccgcaacaaggcatcgtcaccctggcgaccagtgcacccaggccacgccaccagttacggctgatgggccagaagatggaccaggtgctgcccatcccgcccaccgcactgcagctgagcaccgggatcgcggtcctcagctacggcgatgagctggtgttcggcatcaccgctgactatgacgccgcgtccgaaatgcagcagctggtcaacggtatcgaactgggtgtggcgcgtctggtggcgctcagcgacgattccgtgctgctgtttaccaaggatcggcgtaagcgttcatcccgcgcactccccagcgccgcgcggcgggggcggccctctgtgccgaccgcccgagcgcgtcactgacgccatctccgtcggcgttgacccccgtgagagggtgggtcgtgcgcaagttgggcccggtcaccatcgatccgcgccgccatgacgcggtgctgttcgacaccacgttggacgccacccaggaactggtccggcaactccaggaagtcggtgtgggcaccggcgtcttcggtagtggcctagacgttccgatcgtagcggccggccgtctggcggtgcggccgggccggtgcgtggtcgtctcggcccactcggcgggcgtcacggccgcacgcgaaagcggatttgcgctgatcatcggtgtcgaccgcaccgggtgtcgggacgcattgcgtcgcgacggcgccgacacggtggtcaccgacctaagcgaggtcagcgtgcgcaccggggaccgacgcatgtcgcagctgcccgacgcgttacaggcactcggcctggccgacggcctggtcgcccggcagcccgcggtgttcttcgacttcgacggcacgctgtccgacattgtcgaggatcccgacgcggcctggctcgcccccggtgccttggaggcactgcagaagttggccgcgcgctgtccgatcgcggtgctcagtggccgcgacctggccgacgtgacacagcgggtgggtctgcccggcatctggtatgccggcagccatggtttcgaattgaccgcacccgacggaacgcaccaccagaacgacgccgcggcggcagccataccggtgctgaaacaggcggctgccgagctgcgccagcaacttggacccttcccgggtgttgtggtggagcacaagcggtttggcgtcgccgtgcactaccgcaacgcggcccgggaccgggtcggcgaagtcgccgcggcggtgcgcacggccgagcagcgtcatgcgctgcgggtgacgacgggccgcgaagtcatcgagttgcgtcccgatgtcgactgggacaaggggaaaacgctgctgtgggttcttgaccatctgccgcattcgggctcggctcccctggtgccgatctacctcggcgacgacatcaccgacgaggacgctttcgatgtggtcggcccccatggtgttccaattgtggtgcgccacaccgacgacggtgaccgcgccaccgccgcactgtttgcgctggacagtcccgcacgggtcgcggagttcaccgatcggctggcgcgtcagctccgtgaggctcccctgcgggcaacgtgagacgcggtgccgccgcgggcgatacgctccgaccgtcaacgaggaggacggccatgtggtttgcattggtgaacccggagatgctggccgcggcggcgacagacttgggcggcatcaggtcagggatcagcgccgcctatgcgcgtcctctgcggtgacctggctggtagcttaggcacgtctttatcgacaccgggtgctgccagagaactcgagacgcggcacaggtcggcaccatgaggcggcgtgcaatgacgaagatggacgaggctagcaatccgtgcggcggggacatcgaagctgagatgtgccagttgatgcgcgagcaaccacccgccgaaggcgtcgtcgatcgtgtcgcgctgcaacgccatcgaaacgttgcgttgatcacgctgagccatccgcaggcgcagaacgcactcaacctggcgagctggcgtcggctgaagcggctgctggacgatctcgccggcgaatcggggctgcgggcggtggtgctgcggggcgccggtgacaaggcgttcgccgcgggtgccgacatcaaggagtttccgaacacccgcatgagcgccgcggacgccgcggagtacaacgagagcctggccgtctgcctgagggcgttgaccacgatgccgatcccagtcatcgcggcggtccgggggctcgccgtcggtggcggctgtgagctggcgacggcctgcgatgtgtgcatcgcgaccgacgacgcgcgcttcggcatcccgctgggcaagctcggcgtcacgacgggcttcaccgaggcggacaccgtcgcgcgcctcatcggtccggcggcgctgaagtatctgttgttcagcggagaactgatcggcattgaggaagccgcccgctggtgattggtgcaaaaggtcgtcgcaccacaggatttggcggccgcgacggccaaactggtcggccaggtctgtcggcaatccgcggtgaccatgcgtgcggcgaaggtggtcgccaacatgcacggccgagcgctgaccggcgccgacaccgatgcgctgatccggttcggtgtcgaagcctacgagggggcggacctacgcgaaggggtggcggccttcagccagggacgcccacccaaatttgatgattagcgccatgaccgatgctgacagtgcggtccctccccgactcgacgaggacgcgatctcgaaactcgagctgaccgaggtcgccgacctgatccgcacccggcaactgacgtcggcagaagtgaccgagtcgacgctgcggcgtatcgaaaggcttgacccccagctgaagagctacgccttcgtcatgccggaaactgcgctagcggcggcacgtgccgccgacgccgacatcgcgcgcggccactacgagggtgtcctgcacggcgtaccgatcggcgtgaaggatctctgctacacggtcgacgccccgaccgcggccggcaccaccatctttcgtgactttcgcccggcatacgacgcgacggttgtcgcgaggttgcgcgcggccggcgcggtgatcatcggcaagctggccatgacggagggggcctatctcggctatcaccccagtctgccgaccccggtcaatccctgggacccgacagcgtgggcgggcgtgtcctcgagcggctgcggcgtggccaccgcggcgggattgtgcttcggctcgatcgggtcggacaccggggggtcgattcgctttccgacgagcatgtgcggcgtcaccgggatcaaaccgacgtggggccgggtcagccgtcacggcgtcgtcgaacttgcggcaagctacgaccacgtcgggccgatcacccgtagcgctcacgatgcggcggtattgctcagtgtcatagcgggatccgatatccacgatccctcgtgctcggcggagcccgttccggactatgccgccgacctcgccttgacacggattccgcgtgtcggggtggactggtcgcagacgacgtcgtttgacgaggacaccacggcgatgctggccgatgtcgtcaaaacgctcgacgacatcggatggcccgtcatcgacgtcaagctgcccgcgcttgcgccgatggtggcagcgttcggaaaaatgcgcgcggtcgaaacggcgatcgcgcatgccgacacctacccggcgcgcgccgacgagtacgggccgatcatgcgcgcaatgatcgacgccggacacaggctggctgcggtggaatatcagacgctgaccgagcggcgtctggaattcacgcgatcgctgcgtcgcgtgttccacgacgtggacatcctgctgatgcccagcgccggaattgcctcgcccacactggaaaccatgcgcgggctcggacaagacccggagctgaccgccagactggcgatgccgacagcaccgttcaacgtcagcggtaatcccgcgatatgcctaccggcgggaacgacggcgcgcggaacgccgctcggcgtccagttcatcggccgtgaattcgacgagcacttgctcgtccgagccggccacgcatttcagcaagtcaccgggtatcatcgccgacgcccgccggtgtgaaaaaccctcggccgcaaaaggcttgcgaatgtcgcaccgaaggtcgcggcgaatcgccttactggtatgtttacgaacacaatctgtggccatcaagggaggacgcgttgagcattagcgcggttgttttcgaccgtgacggtgtgctcaccagctttgactggacacgtgccgaggaggatgtgcggcgaatcacgggcctaccattggaggagatcgaacgccgctggggtgggtggctcaacggattgactatcgacgacgcgttcgttgaaacccagccaattagcgagttcctctcgagcctggcgcgcgagctcgagctcggttcgaaggcaagagacgagctagtgcgcctcgactacatggcgttcgcccagggatatccagacgcgcgtccagcccttgaagaagcccggcgccgtggcctcaaggtcggtgttctcacaaacaacagcctgttggtcagcgcccgcagcctccttcagtgcgccgctctgcacgacctcgtcgacgtcgtgctgagttcgcagatgatcggagctgccaagcctgacccgcgggcctatcaagcgatcgcggaagccctcggcgtctcgacaacgtcatgcctgttcttcgacgacatcgccgactgggttgagggcgcacggtgcgcgggcatgcgcgcgtacctcgtggaccgttccggacaaactcgcgacggcgtcgttcgcgatttgtccagccttggagcgatcctggacggcgcgggaccatgaccgaacgtgacgagccggacatcgccgacagggacgcctcattggttactctcatcgaccagccgcagtgcacttaggatggcagccttaactaccgtcgccgagcagtaaagtgtcttggcaatccacaacggcgcgtatggcggttcgcagtgttgcgatagccacccacccgcgcgactgatctgcgccgacaaggatgtgccgctgtgcctctgccaatgcgccagagcttgaatgcaatatgctgtctcttccgcagtcgcttggccgtcgaaaaatccccacgagccatcgggcctctgcgtattaagaatccacccaatcgcatctgagcatagggcatcatcatagttactggcagcacatatcagatgcgcagtcgtataatatgccgatcggtgccacttatcccgccagcagaaccgtccaggctccttgcttgatcggatgaattccagaacctttcgtactcgtggatgacatttgtcgtagcccgcctgcttcaacgcaccgagcacgtggacgttcgtcgatatcgaggggccgacttcgtgaaagtaggtacggaaccaatcggcgtcttcgaattgtaatacggctccgatatccggcgaccgtccaaacttcgacaaaacatcgtaggccacacttgtggtgtcacaatcttccaaggtggaatttcctgtccaccccacacctcgaccacggacccaatgttgttcgacatggtcaagatagggtaggtacgtacgaacgatctcaggatcggacaaatcaatatccgtacgcgagagattccatagagaccaaacaatttcaaaaatctcggcttgatagaaggccggcgcaccgccatcgccggcttgaattatcgatgagatgtacgccaaggcccgcttgtctcctggtttaacatgtaacgcgaagtaggctgacgctgatggcgaatacttgaccgatccatttgtctcctgcaagttatcgacatccaacataccgacaccgtcttggccggccagttctacggagaaagctgcggtgatatgtttattgattttgcttccgccgagttttctcaacttctgctcacgcactccgacaagctcgccgaggatggattcctcgtggcaaatggcaaggccaagtcgcgccgcctcagccatcagcgtaggtgcgattaactcaaacccgacggttgcgtcttttatatcaagttgagggccttcgaaagcacccgaggtaaggttcttcagggctagcaagcctttttcaacttgcgctgcgcgcctccgacgatgcttattcgacgtgaggctgatcatggccgccaaagtggagagcagtcgatcttcgtagcagaaagggaactcggctccccatgagccgtcaggaagctggcgctcgcaaagccagttgagggcgaggtcgcttagctcatcatcgagctggcccagcttcgcgacccacgcggtgtcataggctgtgctcgagatgccgttgcctagtgccgctttcgctagcagagtcctgaaagtctccataccatcagccctccgcgaaccagattccatcatgaacacaacccacaccgaaaactctgtcaggctgggctcgatatctgttgcgcagtacattgagctgatcggccgacatcgctgaatagtcaggtttgggccggaaatgacggagatagatatgatcgtacaagatcctccggagcgttgtttcggtcatatagtatgagggagcaacggtgaagtatagactcgtttttcctgagctgagcagcggaaaatcgaaagtgctgaaacgcccaaatccgatgaacatgtcagccttgtcaacatactcgccgtaataaccttcgataatctctctccgcgtgggaggtttaccatgcgtttcgttccacgagatagaaaactgcgcaacagactcagccgcatcgttgccaaaaacaccgaagcatagtctgtgttcagtgttggatgacgtagagattgttaggtcatcgaatgacttgacaacggctgccccttgcgcggtcgaaggcaatcttttcttataatcaccataaaaaagaacgtggacctcgtgttctttatagaacgacagaatttcctcgtcgttggcaagcaaggccatcccttcgagcgcctgtacgatatatcgatcaccacgatccagaagatcgtcgctaaagattggcgagattactgtttcgatgccgtgctcgaagagcatcttcagaatacgaattgattgacgcaaggcggcctgctgataatcgtcgtactgcggattacattcgaggtgaaaccagcggcgtgtgccatcgaagggaaagacggataccttcggtccacggcaacgtacaatctctgctacggatactagaggaagatccaagaattctttttcgctaaccaagttcatgcttcctcttaataactatcgccggaatcaggatggtcttcgggtccagggacttcatgtagtgcgttaagtagtgatttgcatcttatgcggattgcggggccggtgagtccgtggctggaaaggatgtggtcgcggctggcgtggggaatgtaggccggtggcagtcccagtgtgtaggtgcgcgtccgcgggtgtgtccgcccgatgtggtggctaaggtgcgcgccgattcccacgtcggcaatcgcatcttcgacacacacggtgatccgatggcggccagccagctcggtcagtgccgggctgattggccagacccattgtggatcaacgactgtcaccccgatctgctcctcgctgaggcaccgggcggcgtccatgcatggtcgactcatggcacccactgcgaccaagagcacgtcgggtcgccaatgcggtggtggtgtatgcaagacgtcgaggccaccgatggtgtgttcggccgtgatcggttcgcccggcgcccctttggggaaacgcacggcggtgggagccgcggtcgcgatcgcggtacgcaactgttgtcgtagccgaggcgcgtcgcgcggacaggcgatctgaaacccgggcacgcaggccagcagcgccagatcccacaaaccgtgatggctgggtccgtcgggcccggttaccccagcccggtccagcaccagcgtcacgggtaaccggtgcagcccgatgtcgaacagaagttggtcaaaggcgcggtgcagaaacgtcgagtacaccgcgacaacgggatgggttcccgcggcagctagcccggccgcgctggccaacaggtgttgttcggcgatgcccgaatcgaacacccgatgcgggtatcgcctcgacagcgcgcctagaccagtgggcagacgcatcgccgcggtcagcccgacgacgtcggatcggtcgtcagcaatgcgcgcgatttcgtcctcgaacacgtcggtccagctccgctgactgggtgtgctagcgaggccggtggcaatgtcgaccaccccgcaggcgtgcatatggtccctctcgtcagcttcggctggaggataaccccggcccttactagtcactgcgtgaacaacaacgggcctagctgccgcggccgcttttcgtagaaccgcgcacgtgtcggggatgttgtgcccatcgaccggaccgatgtaggtaaatcccatgttctcaaagaggttcggccctcggggtgtgccgacgcgaagttcttctaggtgtgccgcaagagccccagcggtggggtcgtaggagcggccattgtcattgagcacgacgatcacgggccgggtagcggcaccgaggttgttcaggccctcccatgccacgcccccggtgagggcgccatcaccgatcaccgcgatgacacgtcggtcgcattgcccctgcagggccaatgctttggcgatgccgtccacccaggcgaggctgaccgaggcatgggagttctcgacccagtcatgtggcgattcatggcggttgggataccccgatagaccatcggcctggcgcagcgtggcgaagtctttaccgcggccggtgagcagcttgtgcggataggtttggtgcccggtgtcgaacaccgatgtcgtgtggcgaggtgaacacccgatgcaatgcgatggtcagctctaccatgccaagtcccgcgccgagatggccaccggtagccgtcactgtttctatgagccgccgacgcatctgcacggccagctctggcagctggctttcgggcaatgcctgcacatcgcaaggtccgccgatcgcggtaattgaaccgccccggtgagtccggagactctctgatctgagacctcagccggcggctggtctctggcgttgagcgtagtaggcagcctcgagttcgaccggcgggacgtcgccgcagtactggtagaggcggcgatggttgaaccagtcgacccagcgcgcggtggccaactcgacatcctcgatggaccgccagggcttgccgggtttgatcagctcggtcttgtataggccgttgatcgtctcggctagtgcattgtcataggagcttccgaccgctccgaccgacggttggatgcctgcctcggcgagccgctcgctgaaccggatcgatgtgtactgagatcccctatccgtatggtggataacgtctttcaggtcgagtacgccttcttgttggcgggtccagatggcttgctcgatcgcgtcgaggaccatggaggtggccatcgtggaagcgacccgccagcccaggatcctgcgagcgtaggcgtcggtgacaaaggccacgtaggcgaaccctgcccaggtcgacacataggtgaggtctgctacccacagccggttaggtgctggtggtccgaagcggcgctggacgagatcggcgggacgggctgtggccggatcagcgatcgtggtcctgcgggctttgccgcgggtggtcccggacaggccgagtttggtcatcagccgttcgacggtgcatctggccacctcgatgccctcacggttcagggttagccacactttgcgggcaccgtaaacaccgtagttggcggcgtggacgcggctgatgtgctccttgagttcgccatcgcgcagctcgcggcggctgggctcccggttgatgtggtcgtagtaggtcgatggggcgatcggcacacccagctcggtcagctgtgtgcagatcgactcgacaccccaccgcaaaccatcggggccctcgcggtggccctgatgatcggcgatgaaccgggtaattagcgtgctggccggtcgagctcggccgcgaagaaagccgacgcggtctttaaaatcgcgttcgcccttcgcaattcggcgttgtcccgccgcaagcgcttcagctcagcggattcttcggtcgtggtcccgggccgtgcgccggcatcgacctgcgcctggcgcacccacttacgcaccgtctccgcgcagccaacaccaagtagacgggcgacctcactgatcgctgcccactccgaatcgtgctgaccgcggatctctgcgaccatccgcaccgcccgctcacgcagctccggcgggtacctcctcgatgaaccacctgacatgaccccatcctttccaagaactggagtctccggacatgccggggcggttcaaatcaagtccccgcgtccgttgcgaatcgtggttgtcattgcgcgcgaacctgtttgggaaggccgaatcgcaccgtctcggtcgctatcgagcgttccaccacggtgatcgaggcgtatccgcgaagtgcatcaatcacctgccccaccagtcgtggcggcgcggaggctcccgcggtgacaccgatcgtcgagaccgacgacagccattcgggctcaatgtcatcaggcccgtcaatcaagtaggccggcgtcccacttcgctgcgccaactcgaccagacgccgcgaattcgacgaattgcacgagccaatcaccaacacaacgtcacattcaccgaccatcgattgcagcgcacgctgtctgttcgtggtggcatagcagatgtcttcagaggggggttggcccaacgtcggaaacctcgcgcgcagcgcatcaatgacatcggcagtttcatcaagtgccagggttgtctgggtcagatacgatagctgggtaccctcgggcaggttcaacgctgccacatcagcgggtgtctgcaccaataatgttgaccgcggagcgacgccaagcgtgccttcggtctcctcatgtccggcgtgcccgatgaagaccaccgtgtcaccgcgcgcggcaaaccgtgcggcttcagcgtggactttcgccaccagtgggcaggtcgcgtcgacgacctgcagtccccgctcatcagcgcccgcgcgcaccgccggggaaaccccatgcgcggagaacaccacgaccgcccccggcggcggcggatcgggaatctcgtcgagatcctcgacgaacactgctccccggtcccgcaactcggcaaccacaacagtgttgtgcacgatttgcttgcgcacatacaccgggccttcggccacgtcaagcactcgcttgaccgtctcgatagcacgctctacaccggcgcaaaacgaccgcggcgacgccaacagcaccgtgacttcacccgaagcgtatccctgtgcgaccggtcccacgaacacctcagccatcagcactcccggcgacatatcagttgcgacaacgcgatcaggtctggggatcgcaccgcatcgggcagtgccgcaatagcagcctggatgcgttcatcggcgcatcgctgcgccacatgaccacccccggccaccttgacaagcgcggtagcccgctcgacatcgcttgctgtcattgcggcaggtgcttgatagagggccgccaattcggtcgccgcttcggatcgcgagttcagggcggcaacaactggcagtgtcgccttacgtcgggcaaggtcgttgccgaccggctttcccgtcacaccagggtcaccccagatgccgatcagatcgtcgacgcattgaaacgcaagacccaactcatggccaaaacgctccaacgcagcaatcgtcgcgtcgtctgcattggccactaaagctcccagagcgcaacaacaaccggtcagggcggccgtcttgcccgcggccatccgcagatagtcatcgactgtaacttcgggctgtccctccaataaacaatcctcaaactggccgatacacaagtccaggcacgacatctgcaatcgccttatcgccctgaccgccacacactcgtcggtcaggccggtcagtatccgaacggccgtggcgtgcaacgcatctcccaacaggatcgcgacgcccacaccccacacactccataccgtcggccgtcccctgcgagtcgcatccccatccatcacatcgtcatgcaacaacgtgaagttgtgcaccaactccacagccgccgacaccggagtagcatcaccgacatcaccaccgcaagccgcggccgccgcgtagacaagggcggcgcgaaaatacttgcccgacgatcctgccgctgtggatcgatcggcgttccaccagccaaggtgatatcccgccatcgtcgccaacggctcgcgcatcgactcaatggcccgatgcagcacagggccacaatccgctcgagcccgttctaacaatgctttcccaaggtcagcagggacactccccagaaaagccgcatccagagtcaatacgcctcccattcttaacctcaccggagcaacagtgagtcgctattttcagcgaacgagcaatcggcgatattgcttcacttcggagatacccaaatatttcaaatatcaacgcaacatgtacctatgcccgtcgaccaacacgaccatcagggttgttagcaatgatctcggaattcgagttgtccagacgccccgggtcatccactacagaaagacacgcataccctgcggcgacctatacttcccatcacggcgggtaggttgccttcgacaatactgcaacattcaattgcctggcctttctcggagtatcttgcggacttgaagctcacacatcggccggcgtcgaacgcctcacgctgcagagcagtttagtggatttcatcagcatcggatatgcataattgaaaccacagcactttcataaacagtgtccagatgatttacacctaatttgggcggcgaatgctacgcaatggtggtgcgcttcccaagggagcacaacgcgaagctaaagcagttgcacgccgagaccgagccgaaaggtcgccctgcggggaaggcggccacgggagaattgtgagctcggcggtcgaccacgacgtacccgccacgccgtagtaatgggcatttgtacatgtacattcgcacacaaggagaggtcttgacgtatctattccctctctgcgcgatcgcggcggaggcggcggcaaccagcctgttcaagggcagtttcggggactttcgcgtctgctcgccgggtcacgacggggcgatcacggccatgccgagcgtcttggcggcgtcgcgcatccggtcgtcgtaggtgcacaaccggcccagatcgacgccgagccgctgcgccgtcgccaagtggatggcatcgagcgtgcgcagctcgaatggcagcagcccaccagcgagatcgaggacgcgcttgtcgacgcgcagcagatcgagatgagccagcgcccggcggccggctttccgcgctgattcacccttgtcaagcagggcccgcatgacctccgcgcgcgcaagggcactcgacactcgcgggtggcgggtgcgaaggtagcggcgcagcgcgtccgactctggctcgcgaaccgcgagcttgacgatcgcggacgagtcgagatagatggccgccatcaacgctcgtgctcacgcaggcgcgcaagcgtcaccgacggcagctcgacgcccgcgtcgaggtcgagcggttcgggcagatcaacgacgtcgagcgtggcacgctcgatctcgccgcttgccagcagctgctcgtatggaccgccctgcggcagcggcgagagcagggcgacgggccggccgcggtcggtgatctcgatcgtctcgccggcctcgactcggcgcagcagctcgctggcccgctgccgcagcgcacgcacccccaccgaggtcattgtgctaactgtagcacaagcggtcggcgtcatgggccgacgttcgactcgcgcaggctttaagtaacgtcggtgttaattactaggacctgaaaaagtcggcgcgttgttcctcggttggttggcgctgagctgggaggatggcctcaatgcccttgttgcggaagggattgaggccatcgtgtttcgtactgtaggcgatcaggcatcgttgtgggaatccgtgctgcccgaggagttgcggcggctgcccgaagagctggcccgggtggatgcgctgctcgatgattcggcgttcttctgcccgtttgtgccgttcttcgacccgcggatgggtcggccgtccataccgatggagacctatttgcggttgatgttcttgaagttccgttaccggttgggctatgagtcgctgtgtcgggaggtcaccgattcgatcacctggcggcggttctgccgtattccgttggagggatcggtgccgcacccaaccacgttgatgaagctgaccacgcgctgcggtgaggatgcggtggccgggctcaatgaggcgctgctggccaaggcggccagcgaaaagctgttgcgcaccaacaaggtccgtgccgacaccaccgtggtggagggcgatgtgggctatcccaccgacactggactgctcgccaaggcggtcggctcgatggcgcgcaccgtggcgcggatcaaagccgcggacgcgggatcggcgccgctcggtgggtcgtcgggcccgcgcgatcgcctccaagctgcggttacgcggcgcgcagcaacgcgatcaggcgcaggccttcgtgcgccggatcaccggggagctagccgggatcgccgagcaggcgctgaccgaggctgccgcggtggtacgtaacgcccaacgtgcggtgcgccgcgccagtgggcggcgcaaagcctggctacgccaggccatcaaccatctcgagaagctgatcggacgcaccgagcgggtggtggaccaggcccgtagccggctggccggggtaatgcccgactcaagcagccgcctggtcagtctccacgatgccgacgctcgcccgatccgcaagggacgattgggcaagccggtcgagttcggctacaaggcccaggtcgtcgacaacgccgacggtgtcatcctggaccacagcgtcgagctcggaaaccccgcagatgcaccgcaattggcacccgccatcgaacggatcagccgccgcaccggacgcccaccacgggcagtgaccgctgatcggggctgcggagacgcatcggtcgaagatgatctccaccagctcggggtgcgcaacgtggccatcccacgcaagagcaaacccagcgccacccgccgcgcattcgaacaccgacgggcattccgcgacaagatcaaatggcgaaccggatccgaaggacgcatcaaccacctcaagcgcagctacggctggaaccgcaccgaactcaccggcatcaccggcgcccgaacctggtgcggacacggcgtcttcgcccacaacctcgtcaagatcagcaccctggcagcgtgacagacacccgcgcccaccccgaccacgccacgcaggtcgcccagcccgccgccgtcaatgcaaccgcgactttttcaggtcttagtaattagtggccgccgctttgggtccaccggggccctgcggcgaaacaccagacgtgatgccgtgatcggcgatacccttcgacccattgaagggagaacagccatgtcgtttgtgatcgcgaaccccgagatgctggcagcggcggcgaccgatttggccggcatccggtcggcgatcagcgccgcgaccgcggcggccgcggccccgacgatccaggttgccgcggccggcgccgacgaggtgtcgctggccatctcggcgctgtttggccagcacgcccaggcctatcaggcgctcagcgcccaggcgacgatctttcacgaccagttcgtgcaggccctgacctccggcggcaacctgtatgcggccgccgagagccacaccgtcgagcagatggtgctcaacgcgatcaacgcgcccacccagacactgttcggccgcccgctgatcggcgacggcgccaacgggaccgcggagaacccggacggccaaaacggcggcctgctgttcggcaacggcggcaacggctttacccagacgaccgccggggtggccggcggcaacggcggcagcgcggggttgatcggcaacggcggggccggcggcggcggcggggccggcgccgccggcggcctcggcggcaacggcgggtggctgtacggcaacggcggggccggcggcatcgggggcgcgggcaccggaaccggtggtcacggcggggccggcggggccggcggccgggcctggctgtggggcaccggcggggccggcggagccggcggtgacggcggctggttgttcggcgacggcggggccggcggcaccggcggcaacggcggcagcggctttaacagcttgacctcttcggtcggcggcgccggcggggccggtgggcacgccgggctgttcggcgccggcgggaccggcgggaccggcggcatcggcgggcaaaacaccgagaccggcccggccgccagcaacggcggcgcgggcggcgccggtggcggcggcgggtacctggtcggcgatggcggcgccggcgggaccggcggggccggcgggaagaattccagcggtggcgccaccctcaccgggggcaccggagggaccggcggggccggcggggcggccgggtggctctacggcagcggcggcgccggcggtgccggcggcgccggcgggctcaacaacgccggtggtgccaccggcggcaccggcggtaccggcggagccggcggctctggagcgtggctgtacggcaacggcggggccgccggggccggcggcaacggcggcaacaataccagcgccggcaccggtggtgtcggggctagcggcgggaccggcggaaacgccgggctgatcggcgccggcggccacggcggggccggcggcgccggcggaaaccaaaccggtggcgtgggcaacggcggggccggcgggaacggcggcgccggcggggccggtggtcagctgtacggcaacggcggggacggcggcaacggcggggccggcggggccaacatcgccggcggcaatggcagcgacggcggcgccgccggccacggcggggccggcgggagcgcccggctgatcggagccggcggccacggcggggacggcggcgccggcgggaacaccgccggcagaagggccgacgcgatcgccggcaccggcggggacggcggcaacggcgggaatggcggcttgctaagcggcaacgccggggccggcggccacggcggggcgggcgggagcagcaccgcgaccaccaccaccggaacacccccaacgggtgcaacgggcggcaatggcggcaacggcggggccggcggcacggccgggtttaccggcagcggcggcatcggcggcaacggcggggccggcggcaccggcggtaacgccggtgtcgccttgtcggttggcagcacgggcggactgggcggtaacggcggcagcgggggcctcggcggcggcggcgggtcgctcttcggcaatggcggggccggcggtgtcggcgcaaccggcggaaacggcggaagcggtatcgggcccgccagcgtgggtggcaacggcggcaagggcggcgttggtgcggccggcgggcttgccgggcagatcggcaacggcggtagtggtgggtccggcggtgccgggggcaacggcgggaccggcgataccgccggcaacggtggcaatggtggtgccggcgcggtcggcggcaacgcccagctcatcggcaacggcggcaacggcggtggcggcgggaacggcggaaccggcgccgacggcacctaaggcccgcgagcagacgcaaaatcgcccaatttcgtgccgaattgggcgattttgcgtctgctcggcgcagctaacccgccacgtactccaccgcgccgtcgtcgagcaccacccgggcctcggcgccgtcggagccggccacctcggtgcggaacaccgcccggcccggctcggtgcgccagatcaccgtcgacagcgtctcgccgggaaacaccggcttggtgaaccgcgcggcgatcgaggtgatgttggccgccacaccgccgccaagctcggccaccagcgcccggcccgccaccccgtaggtgcacaacccgtgcaggatcggcttgggaaacccggccagctgcgtggcgaaccaggggtcgctgtgcagcgggttgcggtcaccggagagccggtagatcagcgcctggtcctcacgggtcggcatatcgattcgggcgtcggggtggcggtccggaaattccggcgcggccggccgctcaccccgcgctcctccgaaacccccctgaccccgaagcaccaacgtggtaagcgtttcggcaaccaacgaacccgattccgggtcgcaaccgcggccgcgcagcacaacgatggcgttcttgccctcccccttgtcctggatgtcggcgacctcggtgaccaccgacagttttcccgccgccggcagcggcgcatgcagccggatgccctgggagccgtgtagcagcgccgccgggttgaatgttcccacctttgcggccgcaccaaacgccggacagcaaatcaccgcatacgtcggcaacacttgctggtcgatgccgtggctgttctccgtggtgaacgccagatctccggtcccggcgcccaccccgatcgcgtaaagcagcgtgtcccggtcggtccactcgaacaacatcggctcggtcactgcacctatggagttcggatcaatcgccatgcaactctcctcccggttggaaaatcatcgcaagcccttcccccggacggtatcgacagggcaggctatcgccatggcgaagcgcaccccggtccggaaggcctgcacagttctagccgtgctcgccgcgacgctactcctcggcgcctgcggcggtcccacgcagccacgcagcatcaccttgacctttatccgcaacgcgcaatcccaggccaacgccgacgggatcatcgacaccgacatgcccggttccggcctcagcgccgacggcaaagcagaggcgcagcaggtcgcgcaccaggtttcccgcagagatgtcgacagcatctattcctcccccatggcggccgaccagcagaccgccgggccgttggccggcgaacttggcaagcaagtcgagattcttccgggcctgcaagcgatcaacgccggctggttcaacggcaaacccgaatcaatggccaactcaacatatatgctggcaccggcagactggctggccggcgatgttcacaacactattccggggtcgatcagcggcaccgaattcaattcccagttcagcgccgccgtccgcaagatctacgacagcggccacaatacgccggtcgtgttctcgcagggggtagcgatcatgatctggacgctgatgaacgcacgaaactctagggacagcctgctgaccacccatccactgcccaacatcggccgcgtggtgatcaccggcaacccagtgaccggctggaggctggtggaatgggacggcatccgtaacttcacctgaccgcgcggttgacgcttaccgccgctgaccgccacgattgaccgcatgcggtacgtcgttaccggcggtaccgggtttatcgggcgccacgtggtatcccgtctcctggacggccgacccgaggcacggctgtgggcgctggttcgccgccagtcgttaagccgcttcgagcgcctcgccggccagtggggtgaccgggtaagaccgctggtcggtgatctcacggagctcgaactgtccgagcggaccatcgccgagctaggcgatatcgaccatgtgctgcactgtgcggcggtacacgacaccacctgggccgacgccacccgcgccgtcatcgagctggcggcacgccttgacgccacgtttcatcacgtgtcgtcgatcgcggtggccggagacttcgccggccactacaccgaggccgacttcgacgtcggccagcgcctaccgaccccgtatcatcggatgacattcgaggccgaacggctggtgcgctccacgcccggcctgcgctatcgcatctaccgcccggcggtggtggtgggtgattcgcgcaccggcgagatggacacgatcgacggaccctactacttgttcggggtgctggccaagctggcggtgttgccgtcgttcaccccgatgctgctgccggacattgggcgcaccaacatcgtgccggtcgactatgtggccgacgcgctggtggcgctcatgcacgccgacggccgggatgggcagacgtttcatttgaccgcgccgacagcaatcggactgcgcggcatctaccgcgggatcgccggcgcggccggactgcccccgctactcgggacgctgcccggctttgtggccgcaccggtgctcaacgcgcgcggccgcgccaaggtgctgcgcaacatggcggccacccaactgggaattcccgccgagattttcgacgtcgtcggctgcgcgcccacgttcacgtccgacacaacccgggaagcgttgcgcggcaccggcattcacgtccccgaattcgccacctacgcgcccgggctgtggcggtattgggccgagcacctcgaccccgaccgcgcgcgtcgcaacgatccgctgctgggccgccacgtcatcatcaccggtgcgtccagcggcatcgggagggcatcggcgatcgccgtcgccaaacggggtgcgacggtattcgcgctggcccgcaacggcaacgcgctagatgagctggtcaccgagatccgcgcccatggcggtcaggcgcacgcattcacctgcgacgtcaccgattccgcgtcggtggagcacaccgtcaaggacatcctgggccgtttcgaccacgtggactacctggtgaacaacgccggccggtcgatacgccgctcggtggtcaactccaccgaccggctgcacgactacgagcgggtgatggcggtcaactacttcggcgcggtgcgcatggtgctggcgctgctgccgcattggcgcgagcgccggttcggccacgtcgtcaacgtctccagcgccggcgtgcaggcccgcaatcccaagtacagctcgtatctgcccaccaaggccgcgctggacgcgttcgccgacgtggtcgcctccgagacgctgtccgaccacatcacgttcaccaacatccatatgccgctggtggccaccccgatgatcgtgccgtcgcggcggctcaacccggtgcgcgcgatcagcgccgaacgcgcggcggcgatggtgatccgcggactcgtggaaaagccggcgcgcatcgacactccgttgggtacgctcgccgaagccggcaactacgtcgcgccacggctgtcgcgccgaattctgcaccagctctatctgggctatcccgattcagctgcagcgcaggggatttcgcgtccagacgcggaccgcccaccggcgccgcggcgtccccggcgatccgcccgcgcgggagtcccgaggccgctcaggcgcttggggcgactggtgcccggtgtgcattggtagtcacttctggcaggtgaactggttgacgtcgatgtatccgatgcgaaacatctcggcgcagccggtgaggtacttcatataccgctcgtagacttcctcggattgcagcgcgatggcctggcccttgttggcctgcaacgccgcggaccagaggtcgagggttttcgcatagtgcggctgcaacgattgaactctggtgacggtgaagccgtttgcgctggcacactcctgcaccatcggtatcgagggcagccgcccacccggaaagatctcggtcacaatgaatttcaggaaacgagcgaaggtgaacgacatgggcaggccgcgttcgtggatctctttcggatgcaacccggtgatggtgtgcagcagcatgaccccgtcagcgggcagcaggcgatgcgccaggctgaagaacgcgtcgtagcgctcgtgaccgaaatgttcgaaagcaccgatgctgacgatgcggtcgacgggctcgtcaaactgttcccagccggccagcagaacgcgtttggagcgtagattttcggagttggcgaccagctgctgaacgtggttggcctggtttttgctcagggtcagaccgacgacgttgacgtcgtatttttccaccgcgcgcatcatggtggcgccccagccgcagccgacgtccaacagtgtcatgcccggctgcaatccgagtttgcccagcgcgagatcgatcttggcgatctgcgcctcttgcagcgtcatgtcgtcgcgctcgaagtaggcgcagctgtaggtctgagtgggatcgaggaacagccggaagaagtcgtcggacaggtcgtagtgcgcctgcacgttggcgaagtgcggcttcagctcgtcgggcattgggatagcgtatcgtcgtcgcggtgagcgtcgtattcgccgacgtcgacaccggcatcgacgacgcgctggccgtgatctatctgctggccagtcccgacgccgatctggtcggcatcgcctcgaccggcggaaacatcgcggtaggtcaagtgtgcgcgaacaacctgagcttgctcgaattgtgcggtgccgcagacatccccgtgtccaaaggcgccgatgagccgctcggcggccggtggcccgatcacccaaagtttcacggccccaaggggataggctatgccgagctgccggccagcaatcgccggctcaccgattatgacgccacgacggcctggatcgcggcggcgcactcccacgccggcgacctgatcggtctggtcaccggcccgctgaccaacctggcgctggcgctgcgcgccgaacccgcgctgccgaggctgctgcgccggctggtgatcatgggcggcatgttcgacggccagccgatcaccgaatggaacatccgggtggatcccgaggcggccagcgaggtgttcaccgcgtgggccggacaacgacaactgccgatcgtgtgcggtttggatctcacccggcgggtcgcgatgacaccggacattctcgcccggctggcgtccgtctgcggctcgtctccggtgatgcgggtgatcgaggacgcgctgcggttctacttcgagtctcatgaggcgcgcggacatgggtacctggcatatatgcacgacccgctggccgccgcggtcgcaatggacccggaactcctgacgacccggaccgcgacggtggatgtcgacccgacgggggcgacggtcaccgactggtccgggaagcgaaatcccaacgcgcggatcggcatgagcgtcgatccggcggtgttcttcgaccggttcgtcgaacggatcggacgattcgcgcgccgaacgtgaactgacggcgggattttcccgaaattctcgccctgacgtcacgttcggcgcaagtcattcgtagcttccctccagataccaccgccgctgccggtagcacagcagcaacgcggtgccgggatcgccgtccagcaatacctgagcgcgcgcggtgcggccactcgcccgatccggatcccaccaccgctcgtcgtccggccacggtccggcccaccagcgcagccgatcgtctcggccacgaaccctcagccgcgccgggtccgcggagaacatcccccggctggtcacccgtatcgggtttccttgggcgtcaagcaagtccaccggatcgtcgaacagcaccgccggcgacgggtcgggcaacctgccgggccacggctgaccggggtcggcctgcggcaccggctcaggggctactaggcccagcacggtcaacgtgatgcgttcggccgggccgtgtccgccggatagcaccggcacccgcacggcctccggaccgagcaagccctgcacccgcaccagcgcccgacgggcccgaagcctgtcctgttcaccgagcccgccccatagcggcaactgcaagccttccgatgcggacaccgtctccaccgcctgcagccgcagcagagtcaccgccgcggtgggccggtcacgagcattccggttgttcaaccacccgtccagttgccagcgcacccggtcggcggtggcgtcctcggtcagcggctcggcgcaccgccacacccggctgcgctcttcgccgttggcggtgacggcatgaatggccagccgggtgcagcccactccggcggccatcagcgcccgatgcagctcggcggccagcgagcgcccggcgaacgccgcggcgtcgacccggtcgatcggcggatcgcatgccagctcggcggccagatccggcggcggctcccgcccgcagggcgcccgttccggttcgccgcgggcgaaccggtgcgcggccaccgcgtcggcaccgaacctggacgccacgtcggtacgagacagcgcggcgaactgtccgatggtgcgaatccccatcctccacaacagatccgtcaggtcgtcccggcccggcccggacaggctcggctcggtggcaagttggcggatcgacagcagcgacagaaaccgcgcatcgcctcccggctccacgatgcggccagcacgcgcggcgaaaaccgcggtagacaaccggtcggcgattccgacctgacactccgcgccggccgcggccaccgcgtcgatcagccgctcggccgccatctgctcggacccgaaaaaacgggccggcccgcgcaccggcaacaccaggagcccgggccgcagcagctcggcgcggggcaccagatcgtctaccgccgcgatcaccccttcgaagagccgggcgtcgcggtcggcgtcggcagtcgctataaacagttgcggacaccgcgccgccgcctcccgacgccgcaaccctcggcgcaccccggccgcccgcgcggtcgccgagcaggcgatcacccggtttgccaacgtgaccgcgaccggggccgtcgcggataggcccgcggccgcggccgccgcgaccgcgggccagtccatacaccagatcgccagcacgcgagcggaggccatcaccgtccacgcccgttgatctgcagccgcaccccactgatccgccccaaccccggggtgggcacgcccctgagggccggggtgatctcatagccgcagacccgggccgcaagccgcgtcgacacgccttgccagtcgccgtcggtgaccagcagggtgcagcctttttgacgggcacgggccaccactgcccgcgcccgcgcccgcgtcacccggcgccctcccagaccgagcaccaccagatccatgccgtcgatcagcacagcggccacctcaaccggatcggtcccgggatctggtatcaccgcgagccggctcagatccgcccccatctccaccgcggccagcaacccgatatccggctggccaacgatggccgcgtttcccccggccgccgtcaccgatgccaccatgctcagcagcagtgaccgcgcacccgacagcactcccaccgtccccgggggcaacgacaccggtcccgccggcaccaggtcgcccgaacggctgggccccccggacaccttctcggacagcaaagccatctgccgtcgtagtgattcgagctgctcagcaccattttcaaggcgttggtcggaggcgaaggccgcagtcatgaccagcctcctgttcgaaaatatgttcgaagtcagtaaacacccgtccttggagtccgtcaaggtcatgagaggctgccttgtgcaatcgcgtaaaaccacctcggtactggcggctgccctgctgttttgcggcctgttaggcccagggacggccccaccggccaccggtggcgggcctgcctgccggccggcagagctcttcgccaccgacaacaccaccgatgggttcgagctaccggccgttgcgactatcgcactaaccggcacggtggtgaccggatcgaccctggtcgacggcgtgttctggtcgaatgagcgccagcagatcggctacgagcgctcccgtgaatttcatctgtgcgttgtcgacgcgcccacattgcacaacgccgccgaggcactgcaccgccagttcaaccaagaagcggtgctgaccttcgactacttgccgcagaatgcacccgaggcggacgcgatcctcatcaccgtgcccgacatcggcatcgcccgcttccgcgatgccttcgcatctgatttggctgcacaccaccgattacggggcggatctgtcaccacagccgaccacaccttaatcctggtcgccggcaacggcgatctcgatgtcgcccgccgactcgtcgaggaggccggcggggactggaacgcaaccaccattgcccatggcaggcgtgaattcgtgaactagctgatcaagggcgctccgctggccacccgagccgggttggtcacattagttagtcacag

SEQ ID NO: 380 - DNA, 2602 bp, Pisum sativum
atcacacatcactctaaaactaaacattacttacttctttccatcatcaccatgtttactcacttctccacccactttcatcttccatcttcttcttctctcttctttcttcatccattctacaaatcctcttctttaggtgctgtgtcgtttgtggctaaagacaaagagaaaagatgtagagctatatccaaatcaagaactcaggaatatgaaggagtatttcaaactaatgtagcaacattaaagttgagtgaaattaatgtggaagatgtcatagtcatagatgatgaagaggagcaagatattagggtgggtttagtgaacaaaataaaatcaatattgagttcattggaagatggagagataactatatctgcttatgatactgcttgggttgctcttgttgaagatgttaatgctattagcacccctcaatttccttctagtctagagtggattgcaaaaaatcaacttcaagatggttcatggggtgatagccgattattctcggctcatgatcgaattatcaatacattggcatgtgtaatcgcgttacgatcatggaatatgcattcagaaaagtgtgacaaaggaatgatattttttagagagaatcttagcaagcttgagaatgagaatgaggagcatatgccaattgggtttgaagttgctttcccttcactacttgaaggagctagagggattaaaccattgatgtgcccaaatgattctccaatattgaaaaacatatttgaaaagagagatgaaaaactcacaagaataccaaaagagataatgcataaagtgccaacaacattgttgcatagcttggagggtatgtctggcttggattggaaacaacttctaaaattgcaatcacaagatggatcattcttgttttctccatcttccacagcttttgcattaatgcaaactaaagatggaaattgcctaaaatacttgaataatgttgtcaaaaaattcaatggaggagtcccaaatgtgtatccggtggatttatttgaacatatttgggtggttgatcgtctcgaacgccttggaatatctcgattttttcgacatgagatcaaagattgtatgaattatgtgtctaagatatggagtgaaaaaggaatttgttgggcaagaaattcaaatgttcaagatattgatgacacagcaatggctttcagattacttagattacatggtcaccaagtttcagcccatgtgtttaagcactttgagagaaatggtgaattcttctgctttgctggtcaatgcacacaagcagtgacaggaatgtataatctatttagagccagtcaagtgctttttccaggagagaaaattcttgaacatgccaaacacttttctgccaaagttttgaaggaaaagagagaagcaaatgaactcatagataagtggatcataatgaagaatctgcctgaagaggttggttatgcattggacatgccatggtatgcaaatttagatcgcattgagacaagattttacattgatcaatatggtgctgaaagcgatgtatggattggcaaaactctttacaggatggcgtatgtgaacaacaacaattatctcgagcttgctaaattagactacaacaattgtcaagcacaacatttaatcgaatggaatgtaattcaaacatggtacttagaatctagattgggcgaatttggattgagcaaaagggatcttttattggcttattttttggccaccgggagcatatttgagcctgaaagatctcatgagagacttgcttgggcaaaaactacggctctccttgagacaatcaagtgttatgttaggaatgaagatttgaggaaagattttgcgaaaaaattcaatgaccacatcgatgttcgagactattctattgcccggaggatgaagaggaacaaaacagaacatgaacttgttgagagtctgtttgcaaccataggtgaaatatcatgggatgtaagattgtcttatggtcatgaaattggatatgatatgcatcaatgttggaaaaagtggctttcaagttggcaaagtgaaggagacaaatgtgaaggagaagcagaacttttgatacaaataataaacctatgttctaaccattggatttctgagggaccaagtatgcaatccacaatacagcatcttcttcaactcactaactctatatgccataaacttagttgctatcaaaaggacaaggaattaaaaggcatcagctgccaggaaaacatcaccaactcagaagtagagtccaaaatgcaagaacttgtacaaatggtgtttcaaaaatgtcctaatgacattgattttaatgtcaagaatactttcttcacaattgcaaagtccttttactatgcagctttctgtgattcaaggaccatcaactttcatattgcaaaagttctctttgaaaaagttgtttaatcaaatttattgatttgtataggtattagttcactttcattcatgtgaatatatattttccctttaatgtaatattgaaacaaaaaggaaaatatttgttattgtgattcaatgtgtatatattgtcgttttctaataaatttca

SEQ ID NO: 381 - DNA, 2658 bp, Cucurbita maxima; identical to SEQ ID NO: 378

SEQ ID NO: 382 - DNA, 2797 bp, Zea mays
ccgctagctcttgctttgttgtgtgtcctgatggtcgagttcctcaccgtgcttttgcttttctgctttcacttgcctgcagctgcagctcgtcaatcaggtccatgccgtatccgcatccgtatccgtggcaaagcagcaggaggaggaggaggaggcgcgggcgcgacggggccccgcggcagcctcaggctcgccgggtggtggagcgcgcagcagcaggccccggccacgcgacgacaacgcagcagcccgacaacgtctccagtgctaaagtgttccagaccagccgtgtggaaaccgagtcgaaattgcgaaatggcaggaaaccacaagaccttgaggatgagcaccaggctgaggaggcagagctgcagccacttatcgaccaggtgagggcgatgctacggtcgatgaacgacggggataccagcgcctcggcgtacgacacggcgtgggtggcgatggtgccgaaggtgggcggcgacggcggcgcccagccccagttcccggccaccgtgcgctggatcgtggaccaccagctgcccgacggctcctggggcgactcggccctgttctccgcctacgaccgcatgatcaacaccctcgcctgcgtcgtcgcgctgaccaagtggtcgctggagcccgcgaggtgcgaggcggggctctcgttcctgcacgagaacatgtggaggctagcggaggaggaggcggagtcgatgcccatcggcttcgagatcgccttcccttctctcatccagacggctagggacctgggcgtcgtcgacttcccgtacggacacccggcgctgcagagcatatacgccaacagggaagtcaagctgaagcggatcccaagggacatgatgcacagggtcccgacgtccatcctgcacagccttgaagggatgcctgacctggactggccgaggcttctgaacctccagtcctgcgacggctccttcttgttctctccttcggctaccgcttacgcgctgatgcaaaccggtgacaagaagtgcttcgaatacatcgacaggattgtcaaaaaattcaacgggggagtccccaatgtttatccggtcgatcttttcgagcacatctgggttgtggatcggttggagcgactcgggatctcccgctacttccaacgagagattgagcagtgcatggactatgtgaacaggcactggactgaagatgggatttgctgggctaggaaatccaatgtgaaggatgtggatgacacagctatggctttccgactactaaggctacatggatacaatgtctctccaagtgtgtttaagaactttgagaaagatggagagttcttttgttttgtgggccaatcgactcaagccgtcactgggatgtataacctcaacagagcctctcagataagttttcaaggagaggatgtattgcatcgtgctagggttttctcgtatgagtttctgagacagagagaagaacaaggcatgatccgtgataaatggatcgttgccaaggatctacctggcgaggtgcaatatacactagacttcccttggtatgcaagcttgcctcgtgtagaggcaagaacctatctagatcaatatggtggtaaagatgacgtttggattggaaagacactctacaggatgcctcttgtgaataacgacacatatctagagttggcaataagggatttcaaccattgccaagctctgcatcagcttgagtgtaatgggctgcaaacgtggtacaaggataattgccttgacgcttttggagtagaaccacaagatgttttaagatcttactttttagctgctgcttgcatttttgaacctagccgtgctgctgagcggcttgcatgggctagaacgtcaatgattgccaatgccatttctacacatcttcgtgacatttcggaagacaagaagagattggaatgtttcgtgcactgtctctatgaagaaaacgatgtatcatggcttaaacgaaatcctaatgatgttattcttgagagggcacttcgaagattaattaacttattagcacaagaagcattgccaattcatgaaggacaaagattcatacacagtctattgagtcttgcatggaccgaatggatgttgcaaaaggcaaataaagaagaaaacaaatatcacaaatgcagtggtatagaaccacaatacatggttcatgataggcaaacatacttacttttagttcaggttattgagatttgtgctggacgaattggtgaggctgtgtcaatgataaacaacaaggataatgattggtttattcaactcacatgtgctacttgtgacagtcttaaccataggatgttactgtcccaggatactatgaagaatgaagcaagaataaattggattgagaaggaaatcgagttgaatatgcaagagcttgctcaatctctccttttgagatgtgatgagaaaactagcaataagaagaccaagaaaaccttatgggatgtcctaagaagtttatactatgctactcattccccacaacatatgatcgatagacatgtttccagagttatctttgagcctgtttaaaaatgtttaagtggtagaccattatgttaggtgtaaatgtgtacataaaagttatcataaggagtaatggtagcagaagcatgcagttgtaagtttatttgttgcttagaatagaaattagtgtagctataatatcaagaatgttcctatataagtaatcatattatggatagaggtgttcatatgaataataattttatatgttaagtgttatcttacct

SEQ ID NO: 383 - protein, 784 aa, Stevia rebaudiana
MNLSLCIASPLLTKSNRPAALSAIHTASTSHGGQTNPTNLIIDTTKERIQKQFKNVEISVSSYDTAWVAMVPSPNSPKSPCFPECLNWLINNQLNDGSWGLVNHTHNHNHPLLKDSLSSTLACIVALKRWNVGEDQINKGLSFIESNLASATEKSQPSPIGFDIIFPGLLEYAKNLDINLLSKQTDFSLMLHKRELEQKRCHSNEMDGYLAYISEGLGNLYDWNMVKKYQMKNGSVFNSPSATAAAFINHQNPGCLNYLNSLLDKFGNAVPTVYPHDLFIRLSMVDTIERLGISHHFRVEIKNVLDETYRCWVERDEQIFMDVVTCALAFRLLRINGYEVSPDPLAEITNELALKDEYAALETYHASHILYQEDLSSGKQILKSADFLKEIISTDSNRLSKLIHKEVENALKFPINTGLERINTRRNIQLYNVDNTRILKTTYHSSNISNTDYLRLAVEDFYTCQSIYREELKGLERWVVENKLDQLKFARQKTAYCYFSVAATLSSPELSDARISWAKNGILTTVVDDFFDIGGTIDELTNLIQCVEKWNVDVDKDCCSEHVRILFLALKDAICWIGDEAFKWQARDVTSHVIQTWLELMNSMLREAIWTRDAYVPTLNEYMENAYVSFALGPIVKPAIYFVGPKLSEEIVESSEYHNLFKLMSTQGRLLNDIHSFKREFKEGKLNAVALHLSNGESGKVEEEVVEEMMMMIKNKRKELMKLIFEENGSIVPRACKDAFWNMCHVLNFFYANDDGFTGNTILDTVKDIIYNPLVLVNENEEQR

SEQ ID NO: 384 - protein, 784 aa, Stevia rebaudiana
MNLSLCIASPLLTKSSRPTALSAIHTASTSHGGQTNPTNLIIDTTKERIQKLFKNVEISVSSYDTAWVAMVPSPNSPKSPCFPECLNWLINNQLNDGSWGLVNHTHNHNHPLLKDSLSSTLACIVALKRWNVGEDQINKGLSFIESNLASATDKSQPSPIGFDIIFPGLLEYAKNLDINLLSKQTDFSLMLHKRELEQKRCHSNEIDGYLAYISEGLGNLYDWNMVKKYQMKNGSVFNSPSATAAAFINHQNPGCLNYLNSLLDKFGNAVPTVYPLDLYIRLSMVDTIERLGISHHFRVEIKNVLDETYRCWVERDEQIFMDVVTCALAFRLLRIHGYKVSPDQLAEITNELAFKDEYAALETYHASQILYQEDLSSGKQILKSADFLKGILSTDSNRLSKLIHKEVENALKFPINTGLERINTRRNIQLYNVDNTRILKTTYHSSNISNTYYLRLAVEDFYTCQSIYREELKGLERWVVQNKLDQLKFARQKTAYCYFSVAATLSSPELSDARISWAKNGILTTVVDDFFDIGGTIDELTNLIQCVEKWNVDVDKDCCSEHVRILFLALKDAICWIGDEAFKWQARDVTSHVIQTWLELMNSMLREAIWTRDAYVPTLNEYMENAYVSFALGPIVKPAIYFVGPKLSEEIVESSEYHNLFKLMSTQGRLLNDIHSFKREFKEGKLNAVALHLSNGESGKVEEEVVEEMMMMIKNKRKELMKLIFEENGSIVPRACKDAFWNMCHVLNFFYANDDGFTGNTILDTVKDIIYNPLVLVNENEEQR

SEQ ID NO: 385 - protein, 787 aa, Stevia rebaudiana
MKTGFISPATVFHHRISPATTFRHHLSPATTNSTGIVALRDINFRCKAVSKEYSDLLQKDEASFTKWDDDKVKDHLDTNKNLYPNDEIKEFVESVKAMFGSMNDGEINVSAYDTAWVALVQDVDGSGSPQFPSSLEWIANNQLSDGSWGDHLLFSAHDRIINTLACVIALTSWNVHPSKCEKGLNFLRENICKLEDENAEHMPIGFEVTFPSLIDIAKKLNIEVPEDTPALKEIYARRDIKLTKIPMEVLHKVPTTLLHSLEGMPDLEWEKLLKLQCKDGSFLFSPSSTAFALMQTKDEKCLQYLTNIVTKFNGGVPNVYPVDLFEHIWVVDRLQRLGIARYFKSEIKDCVEYINKYWTKNGICWARNTHVQDIDDTAMGFRVLRAHGYDVTPDVFRQFEKDGKFVCFAGQSTQAVTGMFNVYRASQMLFPGERILEDAKKFSYNYLKEKQSTNELLDKWIIAKDLPGEVGYALDIPWYASLPRLETRYYLEQYGGEDDVWIGKTLYRMGYVSNNTYLEMAKLDYNNYVAVLQLEWYTIQQWYVDIGIEKFESDNIKSVLVSYYLAAASIFEPERSKERIAWAKTTILVDKITSIFDSSQSSKEDITAFIDKFRNKSSSKKHSINGEPWHEVMVALKKTLHGFALDALMTHSQDIHPQLHQAWEMWLTKLQDGVDVTAELMVQMINMTAGRWVSKELLTHPQYQRLSTVTNSVCHDITKLHNFKENSTTVDSKVQELVQLVFSDTPDDLDQDMKQTFLTVMKTFYYKAWCDPNTINDHISKVFEIVI

SEQ ID NO: 386 - protein, 862 aa, Taxus brevifolia
MAQLSFNAALKMNALGNKAIHDPTNCRAKSERQMMWVCSRSGRTRVKMSRGSGGPGPVVMMSSSTGTSKVVSETSSTIVDDIPRLSANYHGDLWHHNVIQTLETPFRESSTYQERADELVVKIKDMFNALGDGDISPSAYDTAWVARLATISSDGSEKPRFPQALNWVFNNQLQDGSWGIESHFSLCDRLLNTTNSVIALSVWKTGHSQVQQGAEFIAENLRLLNEEDELSPDFQIIFPALLQKAKALGINLPYDLPFIKYLSTTREARLTDVSAAADNIPANMLNALEGLEEVIDWNKIMRFQSKDGSFLSSPASTACVLMNTGDEKCFTFLNNLLDKFGGCVPCMYSIDLLERLSLVDNIEHLGIGRHFKQEIKGALDYVYRHWSERGIGWGRDSLVPDLNTTALGLRTLRMHGYNVSSDVLNNFKDENGRFFSSAGQTHVELRSVVNLFRASDLAFPDERAMDDARKFAEPYLREALATKISTNTKLFKEIEYVVEYPWHMSIPRLEARSYIDSYDDNYVWQRKTLYRMPSLSNSKCLELAKLDFNIVQSLHQEELKLLTRWWKESGMADINFTRHRVAEVYFSSATFEPEYSATRIAFTKIGCLQVLFDDMADIFATLDELKSFTEGVKRWDTSLLHEIPECMQTCFKVWFKLMEEVNNDVVKVQGRDMLAHIRKPWELYFNCYVQEREWLEAGYIPTFEEYLKTYAISVGLGPCTLQPILLMGELVKDDVVEKVHYPSNMFELVSLSWRLTNDTKTYQAEKARGQQASGIACYMKDNPGATEEDAIKHICRVVDRALKEASFEYFKPSNDIPMGCKSFIFNLRLCVQIFYKFIDGYGIANEEIKDYIRKVYIDPIQV

SEQ ID NO: 387 - protein, 946 aa, Phaeosphaeria sp.
MFAKFDMLEEEARALVRKVGNAVDPIYGFSTTSCQIYDTAWAAMISKEEHGDKVWLFPESFKYLLEKQGEDGSWERHPRSKTVGVLNTAAACLALLRHVKNPLQLQDIAAQDIELRIQRGLRSLEEQLIAWDDVLDTNHIGVEMIVPALLDYLQAEDENVDFEFESHSLLMQMYKEKMARFSPESLYRARPSSALHNLEALIGKLDFDKVGHHLYNGSMMASPSSTAAFLMHASPWSHEAEAYLRHVFEAGTGKGSGGFPGTYPTTYFELNWVLSTLMKSGFTLSDLECDELSSIANTIAEGFECDHGVIGFAPRAVDVDDTAKGLLTLTLLGMDEGVSPAPMIAMFEAKDHFLTFLGERDPSFTSNCHVLLSLLHRTDLLQYLPQIRKTTTFLCEAWWACDGQIKDKWHLSHLYPTMLMVQAFAEILLKSAEGEPLHDAFDAATLSRVSICVFQACLRTLLAQSQDGSWHGQPEASCYAVLTLAESGRLVLLQALQPQIAAAMEKAADVMQAGRWSCSDHDCDWTSKTAYRVDLVAAAYRLAAMKASSNLTFTVDDNVSKRSNGFQQLVGRTDLFSGVPAWELQASFLESALFVPLLRNHRLDVFDRDDIKVSKDHYLDMIPFTWVGCNNRSRTYVSTSFLFDMMIISMLGYQIDEFFEAEAAPAFAQCIGQLHQVVDKVVDEVIDEVVDKVVGKVVGKVVGKVVDERVDSPTHEAIAICNIEASLRRFVDHVLHHQHVLHASQQEQDILWRELRAFLHAHVVQMADNSTLAPPGRTFFDWVRTTAADHVACAYSFAFACCITSATIGQGQSMFATVNELYLVQAAARHMTTMCRMCNDIGSVDRDFIEANINSVHFPEFSTLSLVADKKKALARLAAYEKSCLTHTLDQFENEVLQSPRVSSAASGDFRTRKVAVVRFFADVTDFYDQLYILRDLSSSLKHVGT

SEQ ID NO: 388 - protein, 868 aa, Abies grandis
MAMPSSSLSSQIPTAAHHLTANAQSIPHFSTTLNAGSSASKRRSLYLRWGKGSNKIIACVGEGGATSVPYQSAEKNDSLSSSTLVKREFPPGFWKDDLIDSLTSSHKVAASDEKRIETLISEIKNMFRCMGYGETNPSAYDTAWVARIPAVDGSDNPHFPETVEWILQNQLKDGSWGEGFYFLAYDRILATLACIITLTLWRTGETQVQKGIEFFRTQAGKMEDEADSHRPSGFEIVFPAMLKEAKILGLDLPYDLPFLKQIIEKREAKLKRIPTDVLYALPTTLLYSLEGLQEIVDWQKIMKLQSKDGSFLSSPASTAAVFMRTGNKKCLDFLNFVLKKFGNHVPCHYPLDLFERLWAVDTVERLGIDRHFKEEIKEALDYVYSHWDERGIGWARENPVPDIDDTAMGLRILRLHGYNVSSDVLKTFRDENGEFFCFLGQTQRGVTDMLNVNRCSHVSFPGETIMEEAKLCTERYLRNALENVDAFDKWAFKKNIRGEVEYALKYPWHKSMPRLEARSYIENYGPDDVWLGKTVYMMPYISNEKYLELAKLDFNKVQSIHQTELQDLRRWWKSSGFTDLNFTRERVTEIYFSPASFIFEPEFSKCREVYTKTSNFTVILDDLYDAHGSLDDLKLFTESVKRWDLSLVDQMPQQMKICFVGFYNTFNDIAKEGRERQGRDVLGYIQNVWKVQLEAYTKEAEWSEAKYVPSFNEYIENASVSIALGTVVLISALFTGEVLTDEVLSKIDRESRFLQLMGLTGRLVNDTKTYQAERGQGEVASAIQCYMKDHPKISEEEALQHVYSVMENALEELNREFVNNKIPDIYKRLVFETARIMQLFYMQGDGLTLSHDMEIKEHVKNCLFQPVA

SEQ ID NO: 389 - protein, 785 aa, Cucumis sativus
MNLSRPTNLGCFTASSSASLFPGLDVGTKTKTGALRFEETKERIKKLFKNVELSISAYDTAWVAMVPSPNSLNKPLFPECINWVLDHQNPDGSWGILHDHQLVMKATLLSTLACVLTLKRWDIGDDHMSKALSFIKSNIASATDENQRSPVGFDIIFPGMIEYAKDLNLNLPLASMNVDALVQKKELELRSCCSNSEGGKAYLAYVSEGIGKLQDWEMVMRYQRKNGSLFSSPSTTAVAFMHRNDDGCFNYLRSVLQKFHSSVPAIYPLDIYARLHMVDSLQKLGIDGHFKDEIRSVLDETYSCWMQGEENIFLDASTCAMAFRMLRVEGYDVSSDQLTQFSEGLFSNCLGGHLKDFSASLELFKASQIIIYPDEFILENINSWTSRFLNHGLSSGSVHSDRTERLVKQEAVNAFEFPYNSTLERLSNKRALESYSGDIVRISKTAYACLNFGHQDFLELAVEDFNTLQGIHRKELKELEKWVIENKLDKLKFARQKLAYCYFSAAATLTSPELCDARLSWAKNGVLTTVVDDFFDVGGSEEELVNLIQLVEKWDASGETGYCSKEVEIIFLALHSTICEIGKKALPWQGRSVMRNVIDIWLALLESMRKEAEWLKNKVVPSLDEYMENGYVSFALGPIVLPTLYFVGPKLPEEIVGNCEYKKLFKLMSTSGRLLNDTRTFDRESSEGKLNALSLYMISAGGKLTKEEATEAMKGDVDRTRRELLRLVLQENSTIPRACKDLFWKMSCVVHLFYRKDDGFTSHELMNSAKALFEQPMVLDELLNK

SEQ ID NO: 390 - protein, 788 aa, Lactuca sativa
MNIAQITSSAMLVPSSHIPHRSWVVNCCMVQYNPSGLRTASSQAGQVNPTVMTLDVTKERIRKLFNNVEVSVSSYDTAWVAMVPSPNSPKSPCFPDCLNWLLDNQLDDGSWGLLPHQSPLIKDTLSSTLACVLALKRWNVGKDQINKGLHYIESNFASVTDKNQASPFGFDIIFPGMLEYAKDLDIKLPLNQTHLSVMLHERELELRRCHSNGREAYLAYISEGLGNLNDWNMVMKYQMKNGSLFNSPSATASVLIHHQNAGCLHYLTSLLDKFGNAVPTVYPIDLYVRLSMVDTLERLGIKRHFMVEIQNVLDETYRCWVQGDVQIFMDVVTCALAFRVLRSNGYEVSSDPLAKITKEGDYMNSPEKPFKDVYTSLEVYKASQIIYQEELAFREQNLTSYLPSSNKLSNYILKEVDDALKFPFNGSLERMSTRRNIEHYNLNHTRILKTTYSSSNISNKDYLKLAVQDFNECQSIYCEELKDLERWVVENRLDKLKFARQKTAYCYFSAASFLSSPDLSDARISWAKSSILTTVIDDFFDVGGSMDELVNFVHIIEKWNVNVENDCCSEEVGVLFLALKDAVCWIGDKAFKIQERNITSHVIEIWLDLVKSMLREAIWAKDGSIPTINEYMENGYVSFALGPIVLPTLYFLGVKLSEEVVQSSEYHKLYEVMSTQGRLMNDIHSFKREKKAGKLNAVALYMSDGKSGSVEEEVVEEMKILTKSQRKEMMKLVLETKGSVVPRVCKDVFWNMCNVLNLFYATDDGFTGNAILDVVKEIIYEPVSHELI

SEQ ID NO: 391 - protein, 952 aa, Gibberella fujikuroi
MPGKIENGTPKDLKTGNDFVSAAKSLLDRAFKSHHSYYGLCSTSCQVYDTAWVAMIPKTRDNVKQWLFPECFHYLLKTQAADGSWGSLPTTQTAGILDTASAVLALLCHAQEPLQILDVSPDEMGLRIEHGVTSLKRQLAVWNDVEDTNHIGVEFIIPALLSMLEKELDVPSFEFPCRSILERMHGEKLGHFDLEQVYGKPSSLLHSLEAFLGKLDFDRLSHHLYHGSMMASPSSTAAYLIGATKWDDEAEDYLRHVMRNGAGHGNGGISGTFPTTHFECSWIIATLLKVGFTLKQIDGDGLRGLSTILLEALRDENGVIGFAPRTADVDDTAKALLALSLVNQPVSPDIMIKVFEGKDHFTTFGSERDPSLTSNLHVLLSLLKQSNLSQYHPQILKTTLFTCRWWWGSDHCVKDKWNLSHLYPTMLLVEAFTEVLHLIDGGELSSLFDESFKCKIGLSIFQAVLRIILTQDNDGSWRGYREQTCYAILALVQARHVCFFTHMVDRLQSCVDRGFSWLKSCSFHSQDLTWTSKTAYEVGFVAEAYKLAALQSASLEVPAATIGHSVTSAVPSSDLEKYMRLVRKTALFSPLDEWGLMASIIESSFFVPLLQAQRVEIYPRDNIKVDEDKYLSIIPFTWVGCNNRSRTFASNRWLYDMMYLSLLGYQTDEYMEAVAGPVFGDVSLLHQTIDKVIDNTMGNLARANGTVHSGNGHQHESPNIGQVEDTLTRFTNSVLNHKDVLNSSSSDQDTLRREFRTFMHAHITQIEDNSRFSKQASSDAFSSPEQSYFQWVNSTGGSHVACAYSFAFSNCLMSANLLQGKDAFPSGTQKYLISSVMRHATNMCRMYNDFGSIARDNAERNVNSIHFPEFTLCNGTSQNLDERKERLLKIATYEQGYLDRALEALERQSRDDAGDRAGSKDMRKLKIVKLFCDVTDLYDQLYVIKDLSSSMK

SEQ ID NO: 392 - protein, 458 aa, Zea mays
GYNVSSDELYHVVEASGLHNSLGGYLNDTRTLLELHKASTVSISEDESILDSIGSRSRTLLREQLESGGALRKPSLFKEVEHALDGPFYTTLDRLHHRWNIENFNIIEQHMLETPYLSNQHTSRDILALSIRDFSSSQFTYQQELQHLESWVKECRLDQLQFARQKLAYFYLSAAGTMFSPELSDARTLWAKNGVLTTIVDDFFDVAGSKEELENLVMLVEMWDEHHKVEFYSEQVEIIFSSIYDSVNQLGEKASLVQDRSITKHLVEIWLDLLKSMMTEVEWRLSKYVPTEKEYMINASLTFGLGPIVLPALYFVGPKISESIVKDPEYDELFKLMSTCGRLLNDVQTFEREYNEGKLNSVSLLVLHGGSMSISDAKRKLQKPIDTCRRDLLSLVLREESVVPRPCKELFWKMCKVCYFFYSTTDGFSSQVERAKEVDAVINEPLKLQGSHTLVSDV

SEQ ID NO: 393 - protein, 85 aa, Mycobacterium tuberculosis
MTVRAVLRRTVGAQWPILAGVNFWRRGALLIGIGVGVAAVLRLVLSEERAGLLVVRSKGIDFVTTVTVAAAMVYIASTIDPLGTG

SEQ ID NO: 394 - protein, 801 aa, Pisum sativum
MFTHFSTHFHLPSSSSLFFLHPFYKSSSLGAVSFVAKDKEKRCRAISKSRTQEYEGVFQTNVATLKLSEINVEDVIVIDDEEEQDIRVGLVNKIKSILSSLEDGEITISAYDTAWVALVEDVNAISTPQFPSSLEWIAKNQLQDGSWGDSRLFSAHDRIINTLACVIALRSWNMHSEKCDKGMIFFRENLSKLENENEEHMPIGFEVAFPSLLEGARGIKPLMCPNDSPILKNIFEKRDEKLTRIPKEIMHKVPTTLLHSLEGMSGLDWKQLLKLQSQDGSFLFSPSSTAFALMQTKDGNCLKYLNNVVKKFNGGVPNVYPVDLFEHIWVVDRLERLGISRFFRHEIKDCMNYVSKIWSEKGICWARNSNVQDIDDTAMAFRLLRLHGHQVSAHVFKHFERNGEFFCFAGQCTQAVTGMYNLFRASQVLFPGEKILEHAKHFSAKVLKEKREANELIDKWIIMKNLPEEVGYALDMPWYANLDRIETRFYIDQYGAESDVWIGKTLYRMAYVNNNNYLELAKLDYNNCQAQHLIEWNVIQTWYLESRLGEFGLSKRDLLLAYFLATGSIFEPERSHERLAWAKTTALLETIKCYVRNEDLRKDFAKKFNDHIDVRDYSIARRMKRNKTEHELVESLFATIGEISWDVRLSYGHEIGYDMHQCWKKWLSSWQSEGDKCEGEAELLIQIINLCSNHWISEGPSMQSTIQHLLQLTNSICHKLSCYQKDKELKGISCQENITNSEVESKMQELVQMVFQKCPNDIDFNVKNTFFTIAKSFYYAAFCDSRTINFHIAKVLFEKVV

SEQ ID NO: 395 - protein, 789 aa, Cucurbita maxima
MYLSRPTGVARFAASSSSSSSASLFPGVDVDTTTKTGALHFEETKERIKKLFDKVELSVSAYDTAWVAMVPSPNSLNQPLFPECINWVLDSQHADGSWGLLHNDQLLMKANLLSTLACVLTLKRWNIGHDHMSKALDFIKSNIASATDENQRSPVGFDIIFPGMIEYAKDLNLNLPLAPTNVDALVRKKELELRSCRSNSEGGKAYLAYVSEGIGKLQDWDMVMQYQRKNGSLFNSPSTTAAAFMHRNDDGCFDYLRSLLQKFDGSVPTIYPLDIYARLHMVDSLQKFGIARHFKEEIRSVLDETYRCWMQGEENIFLDASTCAMAFRMLRVEGYDVSSDQLTQFSEDIFPNCLGGYLKDFGASLELYKASQIITHPDESVLENINSWTSRFLKHGLSSDSVWSDRTDSVVKQEAVNALEFPYNATLERLISKRAMESYSGDIVRISKSPYACLNFGHQDFLELAVEDFNTLQRIHLKELEELQRWVVENKLDELKFFRLHLGYCYFAAAATLTDPELHDARIAWAQNGVLTTVVDDFYDGGGSEEELDNLIELVEKWDPDGEVGYCSKDVEIVFLALHSTVCEIGRRALVWQGRSVMRNVIDGWLALLKVMRKEAEWSTNKVVPSMGEYMEQAHVSFALGPIILPMLFFVGPKLSEEMIGSCEYQKLYKLMSTAGRLKNDIRSYDRECKEGKLNILSLWMIDGGGNVTKEEAIEAIKGDFERAIRELLGLVLQENTTIPRACKDLFWKLMSIVNLFYMEDDGYTSNRLMNTVKAMFEQPMDLDALLNK

SEQ ID NO: 396 - protein, 823 aa, Zea mays
MPYPHPYPWQSSRRRRRRRGRDGAPRQPQARRVVERAAAGPGHATTTQQPDNVSSAKVFQTSRVETESKLRNGRKPQDLEDEHQAEEAELQPLIDQVRAMLRSMNDGDTSASAYDTAWVAMVPKVGGDGGAQPQFPATVRWIVDHQLPDGSWGDSALFSAYDRMINTLACVVALTKWSLEPARCEAGLSFLHENMWRLAEEEAESMPIGFEIAFPSLIQTARDLGVVDFPYGHPALQSIYANREVKLKRIPRDMMHRVPTSILHSLEGMPDLDWPRLLNLQSCDGSFLFSPSATAYALMQTGDKKCFEYIDRIVKKFNGGVPNVYPVDLFEHIWVVDRLERLGISRYFQREIEQCMDYVNRHWTEDGICWARKSNVKDVDDTAMAFRLLRLHGYNVSPSVFKNFEKDGEFFCFVGQSTQAVTGMYNLNRASQISFQGEDVLHRARVFSYEFLRQREEQGMIRDKWIVAKDLPGEVQYTLDFPWYASLPRVEARTYLDQYGGKDDVWIGKTLYRMPLVNNDTYLELAIRDFNHCQALHQLECNGLQTWYKDNCLDAFGVEPQDVLRSYFLAAACIFEPSRAAERLAWARTSMIANAISTHLRDISEDKKRLECFVHCLYEENDVSWLKRNPNDVILERALRRLINLLAQEALPIHEGQRFIHSLLSLAWTEWMLQKANKEENKYHKCSGIEPQYMVHDRQTYLLLVQVIEICAGRIGEAVSMINNKDNDWFIQLTCATCDSLNHRMLLSQDTMKNEARINWIEKEIELNMQELAQSLLLRCDEKTSNKKTKKTLWDVLRSLYYATHSPQHMIDRHVSRVIFEPV

SEQ ID NO: 397 - DNA, 2705 bp, Ginkgo biloba
atatttgcctaaacctgcacaaatggctggggtgctctttgcaaatctgccttgctcactgcaactctctccaaaagttcccttccggcaatccactaatattcttattccttttcacaagagatcctcatttggatttaatgcacagcactgcgtccgttctcacttaaggctgagatggaattgtgtcgggattcatgcctcagctgcagagactcgtccagatcagcttccacaggaggaacgctttgtgtcgagacttaatgcggattatcatccagctgtctggaaggacgatttcatcgactctctaacatcccctaattcccacgcgacatcgaaatcaagcgtcgatgagacaatcaataaaagaatccagacattggtgaaggaaatccagtgcatgtttcagtccatgggcgacggtgaaacgaatccatctgcatatgatacagcttgggtggcaagaattccgtcaattgacggctctggtgcaccccaatttccccaaacgcttcaatggattctgaacaatcaactgccagatggctcgtggggtgaggagtgcatttttctggcgtatgacagagttttaaacactctcgcctgcctcctcactctcaaaatatggaataagggcgacattcaagtgcagaaaggggttgagtttgtgagaaaacacatggaagaaatgaaggacgaagctgacaatcacaggccaagtggattcgaggtcgtgtttcctgcaatgttagatgaagcaaaaagcttgggattggatcttccttatcacctccctttcatctcccaaatccaccaaaagcgccagaaaaagcttcaaaagattcccctcaatgttcttcataaccatcagacggcgttgctctactctctggagggtttgcaagatgtggtggactggcaagagatcacaaatcttcaatcaagagacggatcatttttaagctcccctgcatctactgcttgtgtcttcatgcacactcaaaacaaacgatgcctccactttctcaacttcgtgctcagcaaatttggcgactacgttccttgccattacccacttgatctatttgaacgcctctgggctgtcgatacagttgaacgcttgggaatcgatcgctatttcaagaaagaaatcaaagaatctctggattacgtttataggtactgggacgccgaaagaggcgtgggatgggcaagatgcaatcctattcctgatgtcgatgacactgccatgggtcttagaatcctgagacttcatggatacaatgtatcttcagatgttctggagaatttcagagacgagaaaggagacttcttttgctttgccggtcaaacgcaaattggtgtgaccgataatcttaacctttatagatgttcacaagtatgttttccgggagaaaagataatggaagaagctaagaccttcactacaaatcatctccaaaatgctcttgccaaaaacaacgcatttgataagtgggctgtcaagaaggatcttcctggagaggtggagtatgctataaagtatccgtggcatagaagtatgccaagattggaggcaagaagttacatagagcaatttggatcaaatgatgtctggctggggaagactgtgtataagatgctatatgtgagcaacgaaaaatatttggagctggccaaattggacttcaatatggtgcaggccttacaccaaaaggagactcaacacattgtcagctggtggagagaatcgggattcaatgatcttacattcacccgccagcggcctgtggaaatgtatttctcagtggcggttagtatgtttgagccagaattcgctgcttgtagaattgcctatgccaagacttcttgcctcgcagttattctagacgatctttacgacacccacggatctctggatgatcttaaattgttctctgaagcggtccgaagatgggatatctctgtgctggatagcgttcgggataatcagttgaaagtttgcttcctagggctgtacaacacagtgaatggatttggaaaagatggactcaaggaacaaggccgtgatgtgctgggctatcttcgaaaagtatgggagggcttgctcgcatcgtataccaaagaagccgaatggtcggcagcaaagtatgtgccgacattcaacgaatatgtggaaaatgccaaagtgtccatagcacttgcgacagtcgtactaaactcaatctttttcactggagaattacttcctgattacattttacagcaagtagaccttcggtccaaatttctgcatcttgtgtctttgactggacgactaatcaatgacaccaagacttaccaggccgagagaaaccgtggtgaattggtttccagcgtacagtgctacatgagggaaaatccggagtgcacagaggaagaagctctaagtcatgtttatggtatcatcgacaacgcactgaaggaattgaattgggagttggccaacccagcgagcaatgccccattgtgtgtgagaagactgctgttcaacactgcaagagtgatgcagctgttttatatgtacagagatggctttggtatctctgacaaagagatgaaagaccatgtcagccgaactcttttcgatcctgtggcgtagcatactgatattatatataatattcatattcaatccaaaaaaaaaaaaaaaaaaaaaaaaa

SEQ ID NO: 398 - protein, 873 aa, Ginkgo biloba
MAGVLFANLPCSLQLSPKVPFRQSTNILIPFHKRSSFGFNAQHCVRSHLRLRWNCVGIHASAAETRPDQLPQEERFVSRLNADYHPAVWKDDFIDSLTSPNSHATSKSSVDETINKRIQTLVKEIQCMFQSMGDGETNPSAYDTAWVARIPSIDGSGAPQFPQTLQWILNNQLPDGSWGEECIFLAYDRVLNTLACLLTLKIWNKGDIQVQKGVEFVRKHMEEMKDEADNHRPSGFEVVFPAMLDEAKSLGLDLPYHLPFISQIHQKRQKKLQKIPLNVLHNHQTALLYSLEGLQDVVDWQEITNLQSRDGSFLSSPASTACVFMHTQNKRCLHFLNFVLSKFGDYVPCHYPLDLFERLWAVDTVERLGIDRYFKKEIKESLDYVYRYWDAERGVGWARCNPIPDVDDTAMGLRILRLHGYNVSSDVLENFRDEKGDFFCFAGQTQIGVTDNLNLYRCSQVCFPGEKIMEEAKTFTTNHLQNALAKNNAFDKWAVKKDLPGEVEYAIKYPWHRSMPRLEARSYIEQFGSNDVWLGKTVYKMLYVSNEKYLELAKLDFNMVQALHQKETQHIVSWWRESGFNDLTFTRQRPVEMYFSVAVSMFEPEFAACRIAYAKTSCLAVILDDLYDTHGSLDDLKLFSEAVRRWDISVLDSVRDNQLKVCFLGLYNTVNGFGKDGLKEQGRDVLGYLRKVWEGLLASYTKEAEWSAAKYVPTFNEYVENAKVSIALATVVLNSIFFTGELLPDYILQQVDLRSKFLHLVSLTGRLINDTKTYQAERNRGELVSSVQCYMRENPECTEEEALSHVYGIIDNALKELNWELANPASNAPLCVRRLLFNTARVMQLFYMYRDGFGISDKEMKDHVSRTLFDPVA

SEQ ID NO: 399 - DNA, 39827 bp, Saccharomyces cerevisiae
agtaaaagagtatgttgaggttatctttactgagatcaacagctactttgccagtgaaatgccaacgtcgtgggctaatattacctgcggcggcaatgtacaccttaggctcattaatatttggtaaggaagcaaggttggcggatgccatggaacgtggtgagttacataacaagaacgttgattatgcgaaagaagctgaagagcgtaccgagttacgtattagggccctggctaatactcggccaatggaacctcggtacaacggccatgttccccttcatcggtacgagaaattgctgctgtttgcaatttccggttggaattcatttttccatcctgaagatggttataatattgtacaattgggtgaggcaactgcattgccggtcttcttggagaatttgaagcaaacaatgttaagtgattcctctgggaggcgcattttgaaggaacaacccaatatcacaacagagattttgcatatggacaaactagctaaattgccacataacacgtttgggtatgtatattaccaatggttgaaaagagaaaacgtttctccggacactagagcacctgtcaaatttatcgacgatcctatgcatgcatatatctttaagaggtatagacaatgccacgatttctatcacgctataaccaacatgcctattatcattgagggggagatcaccataaaggctcttgaaggtgccaacctgggcgtcccaatggccattctcggtggtatccttgcacctttacgtttgaaaaaggtgcaaagaaaaagattatataatatatatctcccttgggctgtcagaacaggtttaagctgcaagccattgatcaacgtgtattgggaggaaatgctggagaaggatgttactgctttgaggaaagagctaaagataacactccctccggatctaaggacaatgaggaaggagcgtgcagcccttaggaaggagattgacgcaaaatacaactcacagaaacgagccacgactccagcatgaatcagcagaacaacttttatctctcgcccatgaagttagatattattatttagtcagctataatatactatataggatggtcgtccaaggcgatcttgcgatctctcatctttaagaaaagtaaggtcgttgatattattgacattaaaggttatggatagaggcaggtggtgtttcctcgtgtccgtatcaagcagaataatgaatctgcaagaactattagcgaaagtaccgctgttgttatcgtatccgaccattattctatccagtaatctgatcgtaccttcccataatgatctcatatcacgagcagcctctacatcagcagcagagtatgctgacgaaaagctaatatttttcagtacagatcatgccatcagactgatttttctgccaaccttcgtagcttcttcctttaacctatttgcgcactattttaacttcatcaattactctagccgaaggaagtattatgttttatttactgcaatttatttcctatccatattgactgcgattttccatccaattcagtcaacatgcatcactctattgattatcaagctcctgactaccgctgatgagtcttcgccaaaaattgccctcaatttcaagaccattttgaaaacatttgttccctttattactttaacattagttatattgcgttgggatccttcttttgatgccagctcaggagatgtgaacaaaatttctacgtctttggccgcatatgctctcttaatattaacgctaagatatgcatcaccgctgatattatcgacgttatcaagtagcataggtgttgtttccaaagacaccagcgtcgcacagcattcgataagtagaaataagagatttccgctaattctcgtgttaccgattttttcctttgttcttttgtatctaatgactatagttaacaagacttacaatatccagttattaatggtatttgtgttttttggatgtctgtccattttctttttatcgttaaaagatttgttcacagaggatggaaatcaaaagaagggaggccaggaggatgaatattgtcgtatgtttgacataaagtacatgatttcctatttatggctgacaaggttcaccattttattgacaggcataatggctattgtagtacattttttatcgtttaatgaaattacttcttccatcaaaactgatttgttaagtttacttttcgtcgtagtggcagaatatgtttccagtttctctaacaaacaacctgattcgcactcccataatcatgcacatcaccattcccatctaaccgattcattgcctctcgaaaatgaaagtatgttcaaacaaatggcattgaataaggacaccaggtccattttttcgtttttattgttgaataccgctttcatgtttgtacaacttttatattcctttcgttccaaatcattgggcttattatctgattcgttgcatatggccttagattgcacatctttgctcttaggtctaattgctggtgtattgaccaagaaaccagcaagtgataaattccctttcggtctaaattatcttggtaccttggcaggtttcaccaatggtgttctgttactcggcatagtgtgcggtatctttgtggaggcaattgagagaattttcaaccccattcatcttcatgcaacaaatgagttgttggttgttgctacgttaggcttattagtgaaccttgtaggtttgtttgccttcgaccatggtgcacatgatcatggtggtactgataatgaaaacatgaaggggatttttttacatatattggcagatacattaggttctgttggcgttgttatttcgacgttattaatcaagttaacacactggccaatttttgatccgatcgcctctttattaattggttccttgattttacttagcgctctgcccctgctaaaatctacttccgcaaatattttactaagactggatgacaagaagcataatctagtaaagagtgcgctaaaccagatttcaacgacgccaggaatcacaggttatacaactcctagattttggccgacagagtcaggcagttccgggcattcacatgcacacacgcattctcatgcagagaatcatagccatgagcatcatcatgatcagaaaaacggttcacaagaacacccgagcttggtgggctatattcatgtacagtatgtagacggcgagaattcgacaattatcaagaaaagagttgaaaaaatattcgaaaatgtgtcgattaaagcgtgggtacaagttgagcctcaaaattccacttgttggtgccgggctacttctatgaacacaatttcagctaacccgaattctttaccgctacagcctatagcaaattgacaattctttgtcctgcataccttttatattaattttttaaacaagatttcatatacataacggtacctatcgtaattattggcggctgcttgtgttgatcacgtcttacgggaaatatcacaatggaagaaaaaaaatacttctaacgaaggaaaagatgtcatccagcattgacctcaaattaccgaagaggttgataaagcaattagcatccaatcggtatcataattcggaaattaagggggaatcctctacatttggtgtttcttctttccatatattttgaatgtttttttcctatgaaaagtgtcttcaggaatcatatatgtaaagagatcattcaattaaatacatcatcgaactaagattataaacaagaatttaacaaagtcacttaatatatcaaaaagaaggcttttaggaactcaaaaatccgcatcatttgcaatttaaaacgtacgtcatcaggcgtatatattcaaagaaaatatctcagtttcattgcactggcttacagttgatatttcaattaaatggaaccatcgaatacccaaaaagaagatcttcctaccgcttttaatggtataaaaagtcaattaaacagcatattaaaatcgaatcaattatttcaagattatgcgctattaaatgggttcttggcatttgttcattccaaattgaatgccgcaatccttacatctatagaatcacaatgtgggaaatcctttgcggctgatcttgattcttttgatcagagcagtatctcttcgattttagatttttcttgggaaagcgttcactatccaatattcaaatggtttcagatgtggaggaattatattctttttgagaaggagaataaaaaacagcagaccaaatttatcgactttagaaagatgaattcgaagatgttaaaattcttcaaaacggtgcaaaacttctatgtcaacgttatcaacacggtttataagaaatatgatatatctgtacttttgccgaaaaggattatccaagacttaaagttaagtgacatcgaaaataccactaatgttggagacattcttgcggtgaagacatttaatagtagtagcccactcgcacatctcatcccaacgcttttccatcgctgtctcttattcttaggaacagcgtatcgttataaaactctcctcgaagaaatttccaataaatacagcatatccaattttaaaaaatctctggacttctttcgtttagcttcgttggtgttaccaagtgctggtgagacgtattcgcaagcaggagcgatattccttcaaacaggaaatttggggattgcagtattcaattttgttaaaggtatgatgacgaagatgccaagccctgtttcaatcaaaaattttggggcattaatggtggacaataaaagttcattaaatcgtagcttgcatactactatcatgaacacttacttacaagaatctaaaggacccaggacacctgctaaagagatactagaattttatttcctgggcctttttgggtctgtttggtcacctaccagttggagagatgatacaaaacctaaccaattaaataacggtatcaagttaaggcatttggaaaatgcactctacgagacgatgtcagcaagatacctgaataatattaagaccatctttcacaatttgatcattacaattggtgggttccatctattattaaaaaggcgttccgatgtaagtgcaaaaaccttgaaggatttacgtagcaatgaattggattacctaaattttgcattcaagtatattgctcacattttaaatgatatcgttaaggaatcatggagcgaaaatcctgaggtttcagaaattctaggtatggtaagaattatcaattgttggataaaagcaaatcccatggttcttcaatattcacaaagtaatctagagtttgttaatgccttggcatacttgataaatgatattgtgaaaaaaaaaccaagtccttcttttagtataacagaacatattcctaaaaggacatactggttcgaagaagacttaatggtgaagggtttatcattcgttaactttcaactatctgattttgacgattatgaaaaaattcttgaaatggatcatagtctcgatagattaattggtaatccgccattatgcgacaagttatcggcatcatctgaaatgctgttaaggttgcaggctgttgtgaatataagttcgcaattattgcagaacaacaactgcggagtagaatggtcagataataaatcacgttatatctttaataagaaaattggatttaaggagaccgttaaaaatagtatgaagacatcgaagcaatccaatgaaaaggccaagttacaaagaaaaaacaaaccttcgaccactaatggctcaatatccatggcggatttggagagacaaatgagaagtagctctttggattctttttctccaactatgggttatagtggttcgtctgtacctatggccccagatacgttcaatgttaagcccagcggtacaataacggggaacaaagtaaatgtagaactgttaaaaatcgaactaagcggtcaaaacgccgatggcgctattacgaatatatctcctggttacagtaacgcagcgatctcttcttcaaattcgacagatgaatcatccttcgatttgaacaacatcctatcttcaatgcaacaaaagcacgcggaaaaatcatttgccaaatccatgcaaggggtgaatgaacaaattccagcgaatgacgtctgccatcaagcccagaggccaatgcaaggtggtctgtattcatcacagcaaccttcatcgatgtcttcattaaactccgcgtatcagaatgcctcgatgcctccatctgcctccatggtatcctatccctatccttttttgaaccagcaggggcaaggggtctttccgccttataatgcacaaaatttacaatggcagagcgaagcttactcattaaagtcaatgaattttgcaaatccaacgtggctaggtgaccagtaccagacatctgcgccgtcgtcagcatatgcgcaagcgcaacggcaaatgtttcaacaacctatgcagcaagatgtggggaagtacatgcaatttccttttgacgcccaaagcaacacggacagcatgaggggaaacagtcggaataatatgttttaatattgttcgttttttatcatagtttttcaaatcttcatatgaatactaggtagaaatttggcttatcagtacgaatgaattacagtttgactgatttgtacacgagaattgacgtataacttcttttgaaagtctttgaaattacatggtagtacatacatatatatatatatatatatatgttatattattgttaattaaatattattatgcgtattttccttttctttattagtatagtattaatgacagtaataataataataatagtaacaatatctctttttttttttcagtgagcttttatttttttttcattgctcttcttttggcctcttttgtttttttcttgatttcctccagtttcatctgttttttctttggatcagatacaaaatctggtttgaacgcgtcatagtgacagtccaatttcaacctttcacagttgaaacagtgcggtctttcctcggtacacttctttttccttaatctacaaatccagcaaccagtacgggaccttgtaccttgagacgttgaggaagtagcattattcgattcttgagaattgtttgcttttgatttcgaagtagtattatttggtcttttctttgatgactgtttcgcctttgattttgccttaggcttgacattttttcctttagatttagcgaaatccggcgaagtagcgttaggataatcagcggtatatgccaagccagaagaagccttcaaagatggagacgatggagctgacgaagttgaggattcgccaagagaattataatcgctattggtttggcttgctactcttgcgtttccaactgaccttctcgattttttcaatggtggaacttccagttgctgttgttgttctggagcagaaaggcgtctgtctattcgcttaccattcttattccaagtaacttgccttgtccttgactcaaaagtgggatctaaaacctttttagagtttagatttaaatggtaaggagacaagtcttgattttggtcctggtcttcatcaaaaacagctgtagaattgttgctttcgaaaatgggttgttgttcggaattatggatacgtaacagaattggtcttaagacaccctttgatggaaaagatgacgaatgaggcctactagccggcacaccgagcgcatttgtgttattcatgtcattgacattggaaatgggtttatcatgagttctatatggggatgatctcatgtttgatagcactgctgctgctgtacccaagtcgtcgtctagtttggtagatgaagatgcagaattcggaccgagcaataatcttgatctcaatccatccaatttagaattgatgtatttcggtggaggtggtgggatgtattgttcatttgtatggaagggactatttctattgttacgattcggcaaatcgccgtaaaaaaacccagtagaaggtcttgacgaagtggcaaacgggtcttcaccgcgattgatattgttccgttgagggttgttgttgtttgtgcttgtaaacgaagatgcggaagttggaggttgagaaggtatttggttgaacctaaaatgctggaaattgtttctgctggtaatggaagagctggtgttcgcatgtcgagagtttgtaggcgtatccgtgtttgaactagcattgttggaggatgattcattcaaagaataagcctcatctctgtatttcgaatttagccagaacgatatgttgatttttgattcgttctcgtccagttttacatttgggtctgttatctctctatccttgttgaaatagaagttcctgggcgccacgcccacggcacattggtcatcatgcacattatgctggacctgagagtcgttagatggactgccgccgcgcttagttccgccgcgcaaatacccgccaatctcattgttattagaggattctctcgaatctgagctttgtatcgaattattgtcgttgttgttggtactgttgtttctgctcagtatcgacataggcgaattggtagtcttaccgttgttcttgttggcgctggtaatgatgagcggcaaatccgatcctgtgcgggaacggatgcccgagcccgtgcccgcgcccgagcctgctgcggtggtaccgggggaagaaaccgctggagcttgtggtggcggcaaatgtattttttttttggcgccggcgacgatagtagtagtggcagtgttactattagtggaggtggaggagtaagggaaaacatcctcgttggttgcagtatactgcggctgaatagcaccggaaatttgtgggtctgtagcctgtgcgacatggccattgcacaatgacttaggatccgaaggtgtattggaaggcgcgagtgggctggcggcagcatgcacagcgttatcgctgtcacggcgatcttgaagtgtagtattggtcgtagtagtagtatcgttttccttaggatcgtctttgatatctccgccactttggactttcaaactcggcgaaccagacggagtatgcacgggagtgttgttgggcgcacatgtcgatttcataatagaaagcaaagggttttcatcgtaggttgtcttgagagattcgatgctagcactggaaattgtaggatggcgggagttagctccatcactaacttcatcttctgcatgttttttgccgtcttggctgctattcatcagcgtggcacgagatgttttattgtgcaaatagtgatgattgttggcggttgtttccatcgaaagcagagaggcagccgcattagattcgtccatgtgtttgctttgagagcgcgccttgtctagcatcgtgagttaaggtccatgcaaatggtttgagtgcggtagtgtcctagttcctgtgcgctgtgcgaaggtgggcgcttcttacgatcactggtctcttgtccttgtcctctatgttcttttcatttttctttttgacggcggcagtttccgcctggcattggtgaaaaggcgccttgaagcacggcggacgtgtcacccggaccgaaacagaagagaagtagcgcagtcttggcaattataggatgcccgaaatccaacgtgcattctattctcgtgattattctcgtgatttcgtgtgcaaccaatggactttaaaaactgcgctctactacttgtagcaatgcatgttttgggcaagtggggttgagtggagtgtcacctcagacgacgtgtcgcttttgtatatccgtttttacggacataagaacgtgccgcccattctgggaaaacaaaacacaggttaaaaaaaaaaagaaaggaatggatggggaatgggacagagaggaaagatagaggtggaaataacaaaagcgtgacaacaaagaagcaaatacggagggacaagcaaagaaaaaacaaggacagaaacaaaaaataggaacaagaagtagcacattcataagcaagagagtacgaaacctgtttacaccccccgagacagttgccctatatcgcttttccctatcaatagtttctaactcatgtcagtcttgcgatcacaacctccttcagttgtaccgctacatctgacaacatccaccagtcgcaaaacagaacaggaaccatcgctattgcactctgcaataattgagcgacatcaagaccgttcggtgccgaattcgaattcgaatccggattcgaaccatcgaataaaaaaggatcgcaataatcacactagctaccattcttcatcgaattcggagtcaaacatggaaagtcctcgcttgtcagatggtgagtcttccactccgacctctattgaagagttaaacccaacaataaataattcgaggctggtgaagagaaactactcaatatcaattgatcctttgcatgacaacagcaataataatacggatgatgatcatccaaacaccataacttctccccgaccaaatagcactagtaacaaggaaatgcagaaatatagttttcccgaaggtaaggagtcgaagaaaataacaacaccctcgttaaactcgaataattgtttggatttggacaattccagtcttgttcacacagattcgtatatacaagacttaaatgacgatcatattttactaaacaagcgcgtttcgaggcgatcttccagaatatcggcagtaacagcaacttccacgacaattaagcaaagaagaaatactcaggattcaaacctgcccaatattccctttcacgcttccaagcattctcaaattctacctatggatgattcagatgtaataaaattggccaatggagataccagcatgaaaccaaattctgctactaaaattagtcactcaatgacttctttgcctcttcacccacttccacaaccttctcaaaagtcaaagcaatatcatatgatatccaaatcaaccacttctttgccgccagagaatgaccactactatcaacacagtcgtggcaccaaccataatcacgctgctaatgctgctgctgttaataataatactactactactaccgctgctacgggtctgaaaagatcagagtctgcaacggcagaaattaagaagatgagacaatctttgctgcataaaagagaaatgaaaaggaaaagaaaaacatttttggtggatgacgatcgtgttttgatcggtaataaagtcagtgaaggccatgtcaactttattatagcttataacatgctaactggtattcgtgtcgcagtgtcacgttgttctggcataatgaaacctttaactccggcagactttagatttacgaagaagcttgcctttgattatcacggaaatgaattgaccccttcttctcagtatgcatttaagtttaaggactactgtcccgaagtctttagggaacttcgtgcattattcggcttagaccctgctgattatttggtttcgttaacttccaagtacattttgagtgagttgaactcgccaggtaaaagtggttcatttttttattattcgagagattacaaatatattatcaagaccatacatcattctgagcatattcatctgagaaagcacatacaagaatactataaccatgtaagagacaatccaaacactttgatttgtcaattttatggtttgcatagagtgaaaatgcctatatcgtttcaaaataaaattaagcatcggaaaatttacttcctagtcatgaataacttatttccaccacacttagacattcacattacttatgatttaaaaggttccacatggggccgttttaccaatttggataaagaaaggttggcgaaagatagatcatataggcctgtgatgaaagatttaaattggcttgaagaaggtcagaaaattaaattcggtccattgaagaagaagacttttttgacacagctgaaaaaagatgtggaattgcttgctaaattgaatacaatggactattccttgttaattggcattcatgacatcaataaagctaaagaagacgacttacaattggcggatacggcatctattgaggagcaaccacagactcaaggacccataagaaccggtaccggaacggtagtacgacatttttttagagagtttgaaggtggaattcgagcatctgatcaattcaacaatgatgtggatttgatttattacgtggggataatcgatttcttgactaattactcagttatgaagaaattagaaacgttttggagaagtctacgccatgataccaagttggtgagtgccatacctccaagagactacgccaataggttttacgaattcatagaagattctgtagatcctctgccccagaaaaaaactcaatcgtcgtatagagacgaccctaaccagaaaaattataaagactgagtagggcacaggtaaataacctatcgtctatgtactcagtctaatctactttgatttaatttaattcaagttatataaatctattcttttccctttaattttaatattttaatttcaatccttttcttattttctatttttgctttttttttttcttttttccatattctcaggccacgtcaggcttgcataagccacgctagctaataattcagcgagaccctattccaaacctaattgttcggaaccatgccatatctcttccgcagtgtgtggctaagcggctttaagaggatacgaaatgtcaaaaaacgagaaaattcgattatatctgtacgaacttttctttgcgcttactgcctgtttactttgctttgccttctactgtttttttttgctcgaggccgatggtgaactgcaacgttatataaactaaagtgccagaataaaaataaagaaaggcaaagggagactatccgtcttcgaaacaagtcaaaagagcgaaaactaatgagccaacaacaaggttactaccaacaaggacccccacagcaaggttattatcaacaaggtccaccacaacaaggttattatcaacaaggtccaccgcaacagggttatcctcagcagcaaccagtctatgtccaacaaggtcaaccaaaggaggaaagctgcttggacagttgtttaaaatgtttgtgttgttgtttcttattagaattggtatgcgataactgattcgtttgttcaagaagtggtcaatataaaaaacgaaatcacatagcctttcatctatgctgcgaaagactgtataattacttttaagcaaaaatgtatataatatgatgggatcgttacgttggaacaagaattgaccatcgttcatctgttgttgaaataaaatttgaagttattcgtcgtactagtatcctatcacatgcggtgtaagaaatcacattgtatgagaagcaattatctaatttaatggacgctgaagttcaagaattggtaatgtgacaggataattaattaacagcatataaaataaaagaataatatttttattatataaaaatatcgatcactcttgtggatttctaaatcctcgaagagaacttttaatgcattctatatgcctaataataaagtcgctatcgaaaatataatatctatgcttatctatattgagaaatggatgaaatttgagataattgttgggattccattgttgacaaaggctatgatattaggtgtaaatgttggaataaaaatcaactatcatctactaactagtatttacgttactagtatattatcatatacggtgttagaagatgacgcaaatgatgagaaatagtcatctaaattagtggaagctgaaacgcaaggattgataatgtaataggatcaatgaatattaacatataaaacgatgataataatatttatagaattgtgtagaattgcagattcccttttatggattcctaaatccttgaggagaacttctagtatatctacatacctaatattatagccttaatcacaatggaatcccaacaattacatcaaaatccacattcccaacatggtagcgcctatgcttcggttacttctaaggaagtcccatcaaatcaagatccgttagccgtttcagcttccaatttaccggaatttgatagagattccactaaggttaattctcaagaagagacaacacctgggacatcagctgttccagagaaccatcatcatgtctctcctcaacctgcttcagtaccacctccacagaatggacagtaccaacagcacggcatgatgaccccaaacaaagctatggcctctaactgggcacattaccaacaaccatctatgatgacgtgttcacattatcaaacgtcacctgcgtattatcaaccggacccacactatccgctgccacagtatatcccaccgctgagtacttcctcacctgatccaatcgattcacaggatcaacactctgaagtacctcaagctaagacaaaggtgagaaataatgtcttaccaccacacactttaacatcagaagaaaacttttctacatgggttaaattttacatcagatttttgaagaactctaatctcggtgacattattccaaatgaccagggtgaaatcaaaagacaaatgacttatgaagaacatgcgtatatatacaataccttccaagcatttgccccatttcatttattgccaacatgggtaaaacaaattttagaaattaattattctgacatccttacagtcctttgtaaaagtgtgtccaaaatgcaaactaacaatcaagaattaaaagattggatagctcttgccaaccttgagtacaacggaagtacatctgctgatacatttgaaattacagtcagcacgatcattcaaaggctaaaagaaaacaatatcaatgttagcgacagattggcctgtcaactaatacttaaaggtctatccggtgatttcaaatacctacgtaatcaatatcgtaccaaaacgaacatgaaactttcccaattattcgctgaaattcaattaatatatgacgaaaataaaatcatgaatctaaataaaccgtcccaatacaaacaacacagcgaatacaaaaatgtttctcgcacatctccaaacacgactaacacgaaggttacaactcgtaattatcatagaacaaatagttcaaaaccaagagcagcaaaagctcacaatattgctacatccagtaaattctcaagggtgaacagtgatcacattaatgaatcaaccgtttcatcacaatacttaagcgatgacaacgaacttagtcttaggccagcaacagaaagaatctaagccaacacgcacaatagactcgaatgacgaactacctgatcaccttcttattgattcaggagcttcgcaaacgcttgtcagatcagcccattatttacaccatgcaacacccaattctgaaataaacatagtcgatgctcaaaaacaagacattcctataaatgccattggtaatcttcacttcaactttcagaacggcaccaaaacatcaataaaagcactacacacaccaaacatagcctatgatctattaagtttgagtgagctggctaaccaaaatattactgcctgctttaccagaaacactttagaaagatcggatggtacagtactagctcccatagtcaaacatggagacttttactggttatctaaaaaatacctaattccttcgcacatttcaaagctaacaataaacaacgtcaacaaaagcaaaagcgtaaataaatatccatatccgttaatacatcgaatgcttggacatgctaacttccgaagtattcagaagtctcttaagaagaatgcagttacatatttgaaagaatcggatattgaatggtctaacgctagcacatatcaatgtcctgactgtctaatcggcaaaagcacgaaacataggcatgtcaaaggatcacgactaaagtaccaagaatcatatgagccttttcagtacttgcataccgatatatttggtcctgtacatcacttaccgaaaagtgcaccttcttactttatatcgtttacagatgagaaaaccagattccaatgggtgtacccattacacgaccgtcgtgaagaatctatcctcaatgtttttacatcgatattagcatttattaagaaccaattcaatgctcgcgttctagttatccagatggatcgtggctccgagtacactaacaaaactcttcataagttctttacgaacagaggtattactgcatgctatacaaccacggcagattctagagcacacggtgtcgctgaacgattaaatcgtactttattaaacgattgtcgcacactgcttcattgcagtggtctaccaaatcatctatggttctcagcagtcgaattttctactataatcagaaattcattagtctcaccaaaaaacgataaatctgccagacaacatgcaggtttagctggactggacattactactatactacctttcggtcaaccggttatagttaacaaccataatcccgactcgaaaatacatcctcgtggcattccaggttacgccttacatccgtcacgaaactcttatggctatattatctatcttccatccttaaaaaagacagtagatactaccaattacgttatattacaaaacaatcaaacgaaattggaccagttcgactacgatacactcacttttgatgatgatctcaatcgtttaacagcccataaccaatcttttattgaacaaaatgaaacggagcagtcatatgatcaaaatacagaatctgatcatgactatcaatcggagattgaaataaactctgatcctctagtgaacgatttctcgtcccaatcattgaaccctttacaattagacaaggaaccagtccaaaaggtacgtgcaccaaaagaagttgatgccgacatatctgaatacaatattcttccatctactatacgatctcgtacaccccatatcattaataaagagagtaccgaaatgggtggtaccattgaatcagatactacttcacctagacactcgtctaccttcactgcacgaaaccaaaagcgacctggtagtcccaatgatatgattgatttgacctcacaggatagagttaattatggacttgaaaacatcaaaactacacgtttgggtggtacggaggaaccatatattcaacgaaatagtgatacaaatatcaaatacaggactacaaatagtacgccctcaatagatgaccgttcgtccaacagtgaatccactactcccatcatctccatagaaacaaaggctgtatgtgataatacaccctccattgatacggatccgccagaatatcgatcttctgaccatgcgactcctaatataatgcctgacaaatcctcaaaaaatgttacggctgattctattcttgacgacctcccacttcctgacttaacccataaatctcctacggacacttctgatgttgcaaaagatattccacacatacactctcgtcagactaattccagtttgggtggtatggatgattctaatgttctgactactaccaaaagtaagaaaagatcattagaagataatgaaactgaaattgaggtatcccgagacacatggaataataagaatatgagaagtctggaaccaccaagatcgaagaaacgcataaatttaattgcagcaataaaaggagtgaaatcgatcaaaccagttcgaacgaccttaagatatgatgaagcaattacatataataaagacaacaaagaaaaagacagatatgttgaagcttatcataaagaaattagccaactattgaaaatgaacacttgggatacaaacaaatattatgatagaaatgacatagatcctaaaaaagtaataaactcaatgtttatatttaacaagaaacgtgatggtacacacaaagctagatttgttgcaagaggcgacattcaacaccccgatacatatgattctgatatgcaatccaataccgtacatcactatgcactgatgacgtcattgtcaatcgcattagacaatgactattatatcacacagctggacatatcctctgcttacttatatgctgatatcaaagaagaattatacataagacctccaccacatttaggtttgaatgataagttactacgtttgagaaaatcactctatggtttgaaacaaagtggtgcaaactggtatgaaaccattaaatcatatttaataaattgttgcgacatgcaagaagttcgcggatggtcatgcgtatttaagaatagtcaagtaacaatttgcttattcgttgacgacatgattttatttagcaaagacttaaatgcaaataagaaaatcataacaacactcaagaaacaatacgatacaaagataataaatctgggtgaaggtgataacgaaattcagtacgacatacttggattagagatcaaatatcaaagaagcaagtacatgaaattaggtatggaaaaatccttgacagaaaaattacccaaactaaacgtacctttgaacccaaaaggaaagaaacttagagctccaggtcaaccaggtcattatatagaccaggatgaactagaaatagatgaagatgaatacaaagagaaagtgcatgaaatgcaaaagttgattggtctagcttcatatgttggatataaatttagatttgacttactatactacatcaacacacttgctcaacatatactattcccctctaggcaagttttagacatgacatatgagttaatacaattcatgtgggacactagagataaacaattaatatggcacaaaaacaaacctaccaagccagataataaactagtcgcaataagcgatgcttcatatggtaaccaaccatattacaagtcacaaattggtaacattttcctactcaacggaaaagtgattggaggaaagtcgacaaaggcttcgttaacatgcacttcaactacagaagcagaaatacacgcagtcagtgaagctataccgctattgaataacctcagtcaccttgtgcaagaacttaacaagaaaccaattattaaaggcttacttactgatagtagatcaacgatcagtataattaagtctacaaatgaagagaaatttagaaacagattttttggcacaaaggcaatgagacttagagatgaagtatcaggtaataatttatacgtatactacatcgagaccaagaagaacattgctgatgtgatgacaaaacctcttccgataaaaacatttaaactattaactaacaaatggattcattagatctattacattatgggtggtatgttggaataaaaatcaactatcatctactaactagtatttacgttactagtatattatcatatacggtgttagaagatgacgcaaatgatgagaaatagtcatctaaattagtggaagctgaaacgcaaggattgataatgtaataggatcaatgaatattaacatataaaacgatgataataatatttatagaattgtgtagaattgcagattcccttttatggattcctaaatccttgaggagaacttctagtatatctacatacctaatattatagccttaatcacaatggaatcccaacaattacatcaaaatccacattctctacagtaaagaatatactggaagttctcctcgatgatataggaatcctcgaaatggaatctatatttctacatactaatattacgattgttcctcattccgtttttatatgtttcattatcctattacattatcaatccttgcacttcagcttcctctaacttcgatgacagcttctcataacttatgtcatcatctaacaccgtatatgataatatattgatactataactattagttgatagacgatagtggatttttattccaacatatattcactcgtttctccgaatgaaaataaataacatctattgactattcctttttgttgatatatcatcatatgtggtgaaagaagatgacaaaaaaattgagaacaagaaatgccaaggtggataaaataatatgataataagcaacaatatataaaatgaaagaggaaataatatcatcattacttagaaaatacgactcatctctgtgtcccctaggaaaagttcaagtatatcctaaacctgatactatggctgagaaatatgtgggtaattagataattgttgggattccattgttgataaaggctataatattaggtatacagaatatactagaagttctcctcgaggatttaggaatccataaaagggaatctgcaattctacacaattctataaatattattatcatcgttttatatgttaatattcattgatcctattacattatcaatccttgcgtttcagcttccactaatttagatgactatttctcatcatttgcgtcatcttctaacaccgtatatgataatatactagtaacgtaaatactagttagtagatgatagttgatttttattccaacataccacccataatgtaatagatctaatgaatccatttgtttgttaatagtttaaatgtttttatcggaagaggttttgtcatcacatcagcaatgttcttcttggtctcgatgtagtatacgtataaattattacctgatacttcatctctaagtctcattgcctttgtgccaaaaaatctgtttctaaatttctcttcatttgtagacttaattatactgatcgttgatctactatcagtaagtaagcctttaataattggtttcttgttaagttcttgcacaaggtgactgaggttattcaatagcggaatagcttcactgactgcgtgtatttctgcttctgtagttgaagtgcatgttaacgaagcctttgtcgactttcctccaatcacttttccgttgagtaggaaaatgttaccaatttgtgacttgtaatatggttggttaccatatgaagcatcacttattgcgactagtttattatctggcttggtaggtttgtttttgtgccatattaattgtttatctctagtgtcccacatgaattgtattaactcatatgtcatgtctaaaacttgcctagaggggaatagtatatgttgagcaagtgtgttgatgtagtatagtaagtcaaatctaaatttatatccaacatatgaagctagaccaatcaacttttgcatttcatgcactttctctttgtattcatcttcatctatttctagttcatcctggtctatataatgacctggttgacctggagctctaagtttctttccttttgggttcaaaggtacgtttagtttgggtaatttttctgtcaaggatttttccatacctaatttcatgtatttacctctttgatatttgatttctaagccaagtatgtcgtactgaatttcgttatcactttcacccagatttattatctttgtatcgtattgtttcttgagtgttgttatgattttcttatttgcatttaagtctttgctgaacaatatcatatcatcaacgaataagcaaattgttacttgactattcttaaatacgcatgaccatccacgaacttcttccataccacactgttttatcaggtatgatttgatagtttcgtaccagttcgctccactttgtttcaatccataaagtgatttcttcaaacgtatcaacttatcattcattcctaaatgtggtggaggtcttatgtataattcttctttgatgtctgcatacaaatatgccgaagatatgtctaattgtgtaatatagtagttattgtctaatgcaagtgacagggatgtcatcaacgcataatgatgtacagtgttggattgcatacctgtatcgtacgtatcaggatgctgaatgtcacctcttgcaacaaatctagctttatgagttccgtcacgtttcttgttgaagataaacattgagtttattactcttttagggtctatttcttttctgtcataatatttgtcagtgtcccaagtattcattttcaatagttggttgacttctttgtggtatgcttcgatatatttttccttttctttaatatctttattataggtgattgcctcatcgtatcttaaagttgtccgtattggtttgattgattttactgcttttacagctgcaatcaggtgaattcgtttcttcgatctcggaggttctaaactacgcatattcttagtattccatgtgtctcgtgataccttaatttcagtttcattatcttctaatgatcttttcttactgttgatagtagtataggcattagagtcaccaataccacccaaactggaattagtttgatgagaatttatcggtgggagttctttaaatgggtcagggaattcggtaggagattctggaggtagatcagggagtgggagatcagcgatgatagattcctcggtattctgttcagaaacagtagttggcgttttgataggaacaatattgtgcgatgaattattttccggtggagaagcatcgattgaaggtgaacggtgtataatccttttctcagtctcttggtcacttatctgcggaacagttttgttgttggtaccacccgtactggatattggtacgtttgtatgattagtctcattttcactgtacgagtctgagtgtctgaaatctttagatttactggcgtacgacgactcatgtgtgttagattgggacatgggagcaagtaaaggaacatctaatctatgcataccacccgaatcggtactctcgatatcggaaatttggggggtgctagatctcttcttagatggaagaatattagattcagatatgttggggtcaacttctctgggtgcgcgaatattggttttagaaacacgtttcgaatcttcagtatgagttgacgggggtgtggaatcggttggactcacagcttttgaaaggacatttctcggttgctcaggatatagttcaatatcagattgaaagtcatggtctgattctatgttaagatcattggattgttggatctcatttgacgcaatgaacgattgatatgaagcagttaaacggtttaagtcttcatcgaaagtgagtgcgtcgtaattgaattgatctaatctggagtccttgccctgaagaataacatagttagttgtatctactgtcttctttaaggatggaagatagatgatatatccataagagtttcgagacggatgtagagcgtagcctgggatgccacgaggatgtattttggagttagggttgtgatcattgacgataacaggttgaccgaaaggtaacaaagtactgatatcaagtcctgccaagccagcatgttgtcttgcagattttttgcttttaggtgaagctagtgaatttctcacaatagtagaaaattcgattgcagagaaccataaatggttcggtaaaccactacattgcagttgagtacggcagtcatctaataaggtacggtttagccgttcagcgactccatgtgctcgggaatccgctgtggttgtatagcatggagttataccatttttttcaaggaatttatggagagttctgttagtatactcagaaccacggtccatttgtataaccaagacactggcctgaaactggtttttaataaaagctagtatcgtagtaaaaacatcgaggatagagtcctcgcgacggtcgtgtaatggataaacccaacggaattttgttgtctcatcagtaaatgagatgaaataggatggtgcactatttggtaggttgtgaactggaccaaatatgtcagtatgtaggtattgaaagggttcgtatgaattttggtattttagtcgtgaacctttgatatgtctgtgtttggtgcttttgccgattaaacaatcaggacattgatagtcaatagcactagaccagtcgacatctgattcgttaaaatacgtgatggtgttatttttaagtgagtatcgaattgtctgtgcattggcatgcgcaagcattcgatgaatgaaaggataaggatatttgcgtgtactttcacttgtatggacattattgatggtgggtacggagatatttgatggaagcaagtactttttagatacccagtaaaagtctccatattttacgataggtgcaagtacagtgccgtcagatcgttctaagacgtttttggtaaagcatgctgtgatatctactgcagccaattcattcaaactgagtaagtcataggctatgttaggagtgtgcaatacctttattgatgttttggtgttgtcctggaagtgaaattgtaggtcaccaatagcgttaattggtatatttcttttttgagcatcaactacgtttatgtcaggattagatgatgctgagtgtatgtgatgagcagatcttataagggttcgtgatgctcctgaatcgagaaggaggtgtccagggagttcatcatcagaatgattagtatgatttactgtagattcagtaagtttctggcctaagatgaaggtcgtgcttattgttcaattgaatcggttcagtagttgatttactgatggaatcgttgtccgtgctgggagagttaatagatgtggatacattgtgagccctggctgttttcgatttcgaattatttgttttttgaggattccgagctataactttgggtttggttgtattcgtatagctgcgagaatcattcttctcatcactccgatttctcctgtaattaggtttgctgtttctcgatccctgttgttcttcataaatagcatggatatctaagaacagttcagcgactgtcatatttagatgtcgatgacgtgtgtagcgtaaaaatttatattcgccagatagacctctcataattaattggcatgcgaccttgttattgatatgaatgccattattgttcagtctgtcgataatgtttgtgacttttgtttcaaatgcatctgcaggtgtactgccattatattgcaaatttgccagggtcacaatgtcgtttgcctcttgggtatcagattgcattttttcaatacttttggaaagaattttcatgatatccgtataatcaacggataggatgtctttgacccaggtaggtaggaattgagagggagcaaatatttgaaaagtgttatacaagaaggtgagttcatcatcagtgatctgacgtacgggttttccgtttactgtcggaataataccaccgagattcgagttttgtaaaaatttgatgtatgttttaacccaatttggaaagtcattaggtgaggttaacattggtggtggtctgacatattttttagtggatgtcatatcagagtccgctgaggatgaatcagtaaatgtattacctgactcaggtgatggagtgctcagaggcgttccaactgatgatggatactgcggaaactgtgattgtggcccaggtggaaagtacataggcgacatttgataaggtgtatacggaatcatagatgggtgtccgtaaaatgaccaaccagatggattggcttggttttgggtcatcatgcactgctgtgggtacggcccattctgtggaggtggtactgaagcaggttgaggagaggcatgatgggggttctctggaacagctgatgaagcaggtgttgttgtctgttgagagttagccttagtggaagccttatcatattcttgaattttggaagctgaaacgtctaacggatcttgatttgtgtggacttccttagaagtaaccgaagcacaggcgctaccatgagatatatgtgggtaattagataattgttgggattccattgttgataaaggctataatattaggtatacagaatatactagaagttctcctcgaggatttaggaatccataaaagggaatctgcaattctacacaattctataaatattattatcatcgttttatatgttaatattcattgatcctattacattatcaatccttgcgtttcagcttccactaatttagatgactatttctcatcatttgcgtcatcttctaacaccgtatatgataatatactagtaacgtaaatactagttagtagatgatagttgatttttattccaacaatggcctctttaacactaatatcccgacaattttcccaaaattcaaagaattctcagaaagagctatttttttttttaataaaattattagtactaattccagtataaataacaatgttatttacgtctctttcgaaaatgctcgtgtagctcagtggttagagcttcgtgcttatagcaacattcggtttccgaagtttctgtgccaaagacctttcaaacaggcctttaaaagcaacgcgaccgtcgtgggttcaaaccccacctcgagcactttctctttttttttcacacgcgtttgcaacatgcccgtattacatgagcttatttgactttagatggttttcagttcttttttttttttttttttttttcagtagattaatgcgaagagttaaatcaccaattcaaagatggcagatggaccaccttgtgggataagtataaaaataactaaaagtggtcttgtgttaaaaatagaatagaaaccactcataaggcaaaagatggctggaaaaaagggacaaaagaaaagtggactaggcaaccatggaaagaactctgatatggatgttgaagatcgtctccaggccgttgtcttgacagactcttatgaaactaggtttatgccactgacagctgtcaagccaaggtgtttgctgccactggctaacgtacctctcattgaatacaccttagaatttttggctaaggctggcgtacatgaagttttcttaatttgctcttctcatgccaaccaaattaatgactatattgagaattctaagtggaacttgccttggtctccatttaaaattaccaccattatgtctccagaagctagatgtacgggtgatgttatgagagatctagataatagaggtatcattactggagattttattttagtcagtggtgatgtattgactaacatcgatttcagcaaaatgctagaatttcacaaaaaaatgcatttgcaagataaagatcacatctcgacaatgtgtttgagcaaagcgagtacctatccaaaaacaagaactattgagcctgccgcatttgtcttagacaaatccaccagtaggtgtatttattaccaagatttaccattaccaagctctagagagaagacttccattcagattgacccagaattgttggataatgtcgatgaatttgtcataaggaatgacctcatcgattgtagaattgacatttgtacatctcatgtacctttgatatttcaagaaaattttgactaccaatcattaaggacagactttgttaaaggtgtcatttcaagcgatatattgggaaagcatatatatgcctatttgacggacgaatatgctgtaagagttgaaagttggcaaacttacgacaccatttctcaagactttttaggtagatggtgttatcccttggtcttagactctaacatacaggacgatcaaacgtattcttatgaatcaagacatatatacaaggaaaaagacgttgttttggcccaatcctgtaaaattggtaagtgcactgcaattggatcaggaacaaaaatcggagagggtacgaaaattgagaattccgtgattggaaggaactgccaaatcggtgaaaatattagaatcaagaacagtttcatttgggatgactgtatcatcggaaataacagtataattgaccattcattaattgcctctaatgccacgttagggagtaatgtacgcctaaatgatggctgtataattggtttcaacgttaaaattgatgataatatggatttagatagaaacacaaaaatatctgccagtccattaaaaaatgccggctcaagaatgtatgataatgaaagcaatgagcagtttgaccaagaccttgatgatcagacactagccgtttctattgttggagataagggtgttggttatatttacgaaagcgaggtgtctgacgatgaagatagttctacagaagcctgcaaagaaataaacactttgagtaaccaattagatgagttatacttaagtgacgattcaatttcttccgccactaaaaagacaaagaaaagaagaacgatgtctgtcaatagtatatacacggatagagaagaaattgattctgaatttgaggacgaagattttgagaaagaaggtattgccaccgtggagcgtgctatggaaaacaatcatgatcttgacacagcattattagaattgaacaccttgagaatgagtatgaacgtgacatatcatgaggtgagaatagcaacaataactgcattattgagaagagtttaccactttattgcaactcaaacattaggtcccaaggacgctgtggtgaaggtttttaatcagtggggactgttgttcaagagacaagcctttgatgaagaagagtatattgatttgatgaacatcataatggaaaaaattgtagaacagagttttgacaaaccggatttgattctatttagtgcattggtttctctatacgataatgacataattgaggaggatgtcatttataaatggtgggataatgtttctactgaccctcgctatgatgaagtcaagaaattaactgtaaagtgggttgagtggttacagaatgctgacgaagaatcttcctcagaagaggaataaaagtccacgcagtaccctgcataatcatgtattaccataaaaaggctttaatatgagaaaaaggtgagcgctatatagatttagtaatttacatgttacagaagcaaaaagcaaatatatatatattttttatcatattagtttttatcctcagtagtactactgaaataataatctcagatttttttttttcacttgccgagggaccttgtcctaagtggcaaagaactgaaaaaaaaaaaaattgaaatgcggtggtatcacatgaagagtaaataacttaagcaaaagagaggccactgagagagtacaagaaagggacaataacaatagacagaagacttttatatttgtaataacttagcgatgtcccaattattcaataactcgcgctcagatacccttttcctaggaggtgaaaaaataagtggtgatgatattcgtaatcagaatgttttggctactatggctgtggctaacgtcgtcaagtcatctttaggccccgttggactggacaaaatgcttgttgatgacattggtgattttaccgtcaccaacgatggtgccactattttgtctttgttagatgttcaacatccagctggaaaaattttagtagaattggctcaacaacaggacagagaaattggtgacggtactactagtgttgttattattgcttctgagttgttgaaaagagctaatgaattagtcaaaaataagattcatccaactaccatcataactggtttcagggttgcattaagagaggctattcgttttataaatgaagttctttccacaagtgttgacactttagggaaagagacgttaattaatatagccaagactagtatgtcctctaagatcattggtgctgactctgattttttcagcaatatggttgtagatgctcttttggctgttaagacgcaaaattccaaaggagaaatcaagtatcccgtaaaggctgtcaatgtgttgaaagctcatggtaaatctgccactgaatcactgttggtgccaggttatgctttgaattgtacagttgcttctcaagcaatgcctaaacgtatcgccggtggcaatgtgaaaatcgcatgtttggatttgaacttgcagaaagctcgtatggcaatgggtgttcaaatcaacattgatgatccggaacaattggagcaaatccgtaaacgtgaagctggtattgttttggaaagagtgaagaagatcattgatgctggtgctcaagttgtgttaaccaccaaaggtattgatgatttatgcttaaaggagttcgttgaagctaagataatgggtgtaagacgctgtaagaaggaagatttgagaagaattgcacgcgctacaggcgccactttggttagttctatgtctaacttagaaggtgaggaaactttcgaaagcagttatttaggtctttgtgatgaagtagttcaagccaaattttctgatgatgagtgtatcttaattaagggtacttctaaacattcatcttcttcgatcattttaagaggtgccaacgattattctttagatgagatggaacgttctttgcacgattctctttctgttgtcaaaagaacgcttgaaagtggaaatgttgtccccggtggaggttgcgttgaagccgcattgaatatctatttggacaattttgccaccacagttggttctcgtgaacagttagctattgctgagtttgcagctgcattattaatcattccaaaaactttagctgttaacgctgccaaggattctagtgaattagttgcaaaattaaggtcctaccatgccgctagtcaaatggccaagccagaggacgttaagaggagaagctacagaaattacggcctagatttgattagaggtaaaattgtggacgagattcacgctggtgttcttgagccaaccataagcaaagtcaaatccttgaaatcagcattggaggcttgtgtagcaattctaagaattgatacaatgattacagtggatccagaaccacccaaagaagatccgcacgatcattgattctttgcgtaatccgaacgagattctgtatctgcatgtaaactaataaacctatataaaatttaattatatttttttcagctagttctatttttgaatttgatcgctaactctgggcagttgataagcgcttcccagcttttcacgtgcgaggtggactaatacgtaataacgcgtacctattaggacttcgttgagttgtttttcttgtccaaatgcagaagcgggtccctacaaactattgtgtttgttcgtaaacgagcaggaaccctgttaaaggaaaaaagcttaacgctagcgttacattttagtaaggcggcaataaaaaagaatgcggagtgtattccatgaattcaattgcgcttactgctaagcctgtttctaaacatgatccccagggtgaatatctcccatagtggctgtgttattctgtctaaatgtggcagctaaataaggttttttccaagctatttttttctctaaacgagcgcaccttagcgggatcgcgtcaaattttcgcccaacgaatattattctattgtcttcagtgaatgtgcttgtcgaaatctatatatgcgccgccctggcaggatcagcaaatacaagttacttggaaagtcgcggcatagaaagtagacacttcttttgtcaaagattgatattgctttcagggtgcgatagtgctgactgttcctctaaacagcgattttttacatacattaactttttgaagttgtaggaactatcttttctcatttatccaacactaaaacaaaattgagctttccagaaatagtgaatcaaaaaaagttaagtacaaatatttacagttcagcagtatgagcgaagtcggtatacagaatcacaagaaagcggtgacaaaacccagaagaagagaaaaagtcatcgagctaattgaagtggacggcaaaaaggtgagtacgacttcaaccggtaaacgtaaattccataacaaatcaaagaatgggtgcgataactgtaaaagaagaagagttaagtgtgatgaagggaagccagcctgtaggaagtgcacaaatatgaagttggaatgtcagtatacaccaatccatttaaggaaaggtagaggagcaacagtagtgaagtatgtcacgagaaaggcagacggtagcgtggagtctgattcatcggtagatttacctcctacgatcaagaaggagcagacaccgttcaatgatatccaatcagcggtaaaagcttcaggctcatccaatgattcctttccatcaagcgcctctacaactaagagtgagagcgaggaaaagtcatcggcccctatagaggacaaaaacaatatgactcctctaagtatgggcctccagggtaccatcaataagaaagatatgatgaataactttttctctcaaaatggcactattggttttggttctcctgaaagattgaattcaggtatcgatggcttactattaccgccattgccttctggaaatatgggtgcgttccaacttcagcaacagcagcaagtgcagcagcaatctcaaccacagacccaagcgcagcaagcaagtggaactccaaacgagagatatggttcattcgatcttgcgggtagtcctgcattgcaatccacgggaatgagcttatcaaatagtctaagcgggatgttactatgtaacaggattccttccggccaaaactacactcaacaacaattacaatatcaattacaccagcagctgcaattgcaacagcatcagcaagttcagctgcagcagtatcaacaattacgtcaggaacaacaccaacaagttcagcaacaacaacaggaacaactccagcaataccaacaacattttttgcaacagcagcaacaagtactgcttcagcaagagcaacaacctaacgatgaggaaggtggcgttcaggaagaaaacagcaaaaaggtaaaggaagggcctttacaatcacaaacaagcgaaactactttaaacagcgatgctgctacattacaagctgatgcattatctcagttaagtaagatggggctaagcctaaagtcgttaagtacctttccaacagctggtattggtggtgtttcctatgactttcaggaactgttaggtattaagtttccaataaataacggcaattcaagagctactaaggccagcaacgcagaggaagctttggccaatatgcaagagcatcatgaacgtgcagctgcttctgtaaaggagaatgatggtcagctctctgatacgaagagtccagcgccatcgaataacgcccaagggggaagtgctagtattatggaacctcaggcggctgatgcggtttcgacaatggcgcctatatcaatgattgaaagaaacatgaacagaaacagcaacatttctccatcaacgccctctgcagtgttgaatgataggcaagagatgcaagattctataagttctctaggaaatctgacaaaagcagccttggagaacaacgaaccaacgataagtttacaaacatcacagacagagaatgaagacgatgcatcgcggcaagacatgacctcaaaaattaataacgaagctgaccgaagttctgtttctgctggtaccagtaacatcgctaagcttttagatctttctaccaaaggcaatctgaacctgatagacatgaaactgtttcatcattattgcacaaaggtctggcctacgattacagcggccaaagtttctgggcctgaaatatggagggactacataccggagttagcatttgactatccatttttaatgcacgctttgttggcattcagtgccacccatctttcgaggactgaaactggactggagcaatacgtttcatctcaccgcctagacgctctgagattattaagagaagctgttttagaaatatctgagaataacaccgatgcgctagttgccagcgccctgatactaatcatggactcgttagcaaatgctagtggtaacggcactgtaggaaaccaaagtttgaatagcatgtcaccaagcgcttggatctttcatgtcaaaggtgctgcaacaattttaaccgctgtgtggcctttgagtgaaagatctaaatttcataacattatatctgttgatcttagcgatttaggcgatgtcattaaccctgatgttggaacaattactgaattggtatgttttgatgaaagtattgccgatttgtatcctgtcggcttagattcgccatatttgataacactagcttatttagataaattgcaccgtgaaaaaaaccagggtgattttattctgcgggtatttacatttccagcattgctagacaagacattcctggcattactgatgacaggtgatttaggtgcaatgagaattatgagatcatattataaactacttcgaggatttgccacagaggtcaaggataaagtctggtttctcgaaggagtcacgcaggtgctgcctcaagatgttgacgaatacagtggaggtggtggtatgcatatgatgctagatttcctcggtggcggattaccatcgatgacaacaacaaatttctctgatttttcgttatgatagaaaatttaaaagtgcagaatattcgaaatagattcccaaaaaaaaaaaaagggatattgtgttacccagttcacaatggaattttctagaagaaaaaacaaagaagcctcgcaacaaaccaagatggattcaaaatgcctacttaccgcattgtatgtgggagaatgaacatatctgtaattgtattatataaaagtagttagtttttttttttttttttttttttttttttttttatgtgtaatgcaaatacaaaaagaactgcaggcattttgaaagttcactcgtataggaaactttgatagagaggcaattccttactttcgttattcctttcagtcttattcttaatcgtttatagtagcaacaatatatcaatatggtcgtgaataacccaaataactggcactgggtcgataagaactgcatcggatgggccaaggagtatttcaaacagaaactggttggagtggaggccggttcggtgaaggataaaaagtatgccaaaatcaagtctgtttcgtccattgaaggtgattgtgaagttaatcagcgtaaggggaaggttatatctttgtttgatttgaaaatcacggtgttaatagagggacacgtggactctaaggacggatcggcattgccattcgagggtagcattaacgttcctgaagttgccttcgatagcgaggcctcaagctatcaatttgacatatctatatttaaggagactagcgaattgagtgaagccaagccactaattagatccgagttattgcccaagttgagacaaattttccaacaatttggcaaggatttgctggccacccatggtaatgacattcaggtgcccgaatctcaggtgaaatctaactacacaagaggtaaccaaaaaagtagctttaccgaaatcaaggactccgcttcaaagccaaaaaagaatgcacttccctcttctacttcaacttcagcaccagtctccagcaccaacaaagtcccccaaaacggaagcggcaatagtacatctatttatttagaaccaacttttaatgtgccttcctccgagctctacgaaacgttccttgataagcaacgcatattggcctggaccagatcagcacaatttttcaacagcggaccgaagctggagaccaaagaaaaattcgagctctttggcggcaacgtgatcagcgagttggtttcatgcgaaaaggacaagaaacttgttttccactggaaactcaaggattggtctgcccctttcaactctactatcgaaatgactttccatgagtcgcaagaattccatgaaaccaaattacaggtgaagtggactggcatacccgttggcgaggaagatcgcgtgcgcgctaattttgaagaatactacgtgcgttctattaaattgacattcggctttggtgccgtattataagatatattgttctcatgtttcaataaaagtatgcgtaaatatttacataccactattggcatagatagaatgcaatacatcatgtagttctgtacggcatccgcgcggctccgatcgcccgtcctacttttgcggcccggcgccgacggcctccccggaatttaccaacgaagaggaaaataaactggagttataacgccattggcgggaaactccgaaaccatagcgccgtggtctttccccggttttttggcgccgggtgtgcttgcgttgtgtgaacggcgccctggcagctgagggggaagggaaacgccggaggcgacggcaaggatgaccatggcgtcaaggaacatgcggaacatgctagaatgattgccgaaaggcgggccctagtcaatggcatcatgcgggaacgtgcagtaaagctcaatgtaacttgatgcctatcggcgttgttcgagctaaggacgatgtgatagactgaggaagggtgaacgtcgatagttagccgttgtgaactaaataaaagtgatattttttcgttgttcttttcttggtttggcggtgttttcatttgttttcatgttttacttcgccacaggttttcaaagaacaacgccttaaaaataggaaaacgttttcgctacaggtgttgttattattgttgttgtgctgttgtttattgtgctatacttgtggtatttattctggacttccgatcggaaattttcttcccttgaagaccttttgaagacaacagttatatatcattgatctgaatttctcaggctattttcaaaattccatacctccttattccaacatttgctcgactactatagaaaagccttattcttttatctttgaaagaaagaaaaggtgtcatagcaaaagtttattgttactctgttttgatatactccctcttattcgttggaagtataagattgatttgcataaattaaccaatcattttgctactttcccggttctccctttattataaacacttcagaaaaatattctgctactattccttactttactataagaattttgttttccaaaaaaaaaaaatataaaaaaaataatcatactctattactatggctaacgtagaaaaaccaaacgattgttcaggctttcccgttgttgacttgaattcgtgcttttctaacggcttcaataatgagaaacaagaaatagaaatggaaacggatgattcaccgattttattaatgtcatcatcagcttccagagaaaactcaaacactttctctgtgatacagaggacgccagatggaaagatcattaccacaaataataatatgaactccaagattaacaagcaactggacaagttgcccgaaaatttaaggcttaatggtagaacccccagtgggaaactaaggtcatttgtttgcgaggtttgtacgagagcgttcgcaagacaagagcacttgaaaagacattacagatcgcatacaaatgaaaaaccttatccctgtggcctctgcaacagatgctttactaggagggacttactgatcaggcatgctcaaaaaatccatagtggtaatttaggggaaacgatttcccataccaagaaagtgtcgagaactataactaaagctcggaaaaattctgcatcctcagtcaagtttcaaactccaacctatggtactccagataatggtaattttttgaatcgcactactgccaatacaagaagaaaagcaagccctgaagctaatgttaaacgtaagtacttgaaaaaactgacgcgcagggcttcatttagcgcacaatcagcatccagctatgctttgcccgaccaatcttcgctagaacaacatccaaaggatcgtgttaaattttctacgcctgaattagttccacttgacttgaagaatcctgaacttgactcttcgtttgacctgaatatgaatctagatttaaacctaaatctagattccaatttcaatatagcattaaaccgttctgattcttctggatcaacaatgaatttggattataaattgcccgaatcagcaaataactacacatattcttccggctcaccaacccgcgcatatgtcggcgctaacacgaattctaagaacgcttcatttaatgacgcagacttattgtcgtcgtcgtactggataaaagcctataatgatcatttgttttcagtatctgaaagtgatgaaacttctccaatgaactctgaattaaacgacactaaattaatcgtcccagattttaaatcgactatacatcatttgaaggattcaaggtcctcctcttggactgttgctatagataataatagcaataacaataaggtatcagacaaccaacctgatttcgtcgattttcaagaactgctggataatgatactttaggtaatgatttgttagagaccactgccgttttaaaagaatttgaacttttacatgatgatagcgtaagtgctaccgccacgtcaaatgagattgacctttcccatttgaacctatcaaactctccaatttctcctcataagttaatttataagaataaagaggggaccaatgacgatatgttgatttctttcggactcgatcatccttccaatcgcgaagatgatctggataagctatgtaatatgaccagagatgttcaagccatattcagtcaatatttgaaaggagaagagtctaaacgatccctggaagactttttatcaacgtcaaacaggaaagaaaagccagatagcggcaactatactttttatgggttagattgtttaacgttatcgaaaatatcaagagctctgccggcctccactgtgaacaacaatcagccatcgcattccatagaatcaaagctatttaatgaaccaatgagaaatatgtgcattaaagtgcttagatactatgaaaagttcagtcatgatagtagtgagagtgtcatggactctaatccaaacttgctgtccaaagaattgttaatgccagctgtgagtgaattgaacgaatatttagatcttttcaagaataatttccttccccatttccctattattcacccaagcttgcttgatttggatttggatagcttgcaacgatatactaatgaggatgggtatgatgacgctgaaaacgcgcagttgtttgatcgattaagtcaagggacagataaagaatatgattacgagcactatcaaatcttgtccatttcgaaaatcgtttgtttacccttatttatggccacatttggttctttgcataagttcggttacaaatctcaaacaatagaattgtatgagatgagtagaagaattctacattcttttttggagactaaaagaaggtgtcgcagtacaacagtaaatgacagttatcagaacatttggttgatgcaatccctaatattgagcttcatgttcgctctagttgctgattatttggagaaaattgactcctctttgatgaaaaggcaattgtccgcattatgttcaacgatcagatcaaactgtttaccgacaatttctgcaaattctgagaagagtatcaataataacaatgaacctttaacatttggttctcctcttcaatacatcatttttgagtcaaaaattagatgcaccttaatggcttatgatttttgtcagttcttgaaatgtttcttccatattaaattcgatttgtctataaaggaaaaagatgttgaaaccatttatattcccgacaatgagtcaaaatgggccagtgaatcgataatatgtaatgggcatgttgtgcaaaagcaaaatttttatgattttagaaacttttattacagtttcacgtatggacacttacactcaataccagaatttttagggtcatctatgatttattatgaatacgatttaagaaaaggaaccaaatcacatgtgtttttggatcgaatcgatacgaaaaggctagagaggagtcttgacacttcttcctatggcaatgataatatggcagcaaccaataaaaatattgcgatc

SEQ ID NO: 400 - DNA, 1578 bp, Saccharomyces cerevisiae
atggaccaattggtgaaaactgaagtcaccaagaagtcttttactgctcctgtacaaaaggcttctacaccagttttaaccaataaaacagtcatttctggatcgaaagtcaaaagtttatcatctgcgcaatcgagctcatcaggaccttcatcatctagtgaggaagatgattcccgcgatattgaaagcttggataagaaaatacgtcctttagaagaattagaagcattattaagtagtggaaatacaaaacaattgaagaacaaagaggtcgctgccttggttattcacggtaagttacctttgtacgctttggagaaaaaattaggtgatactacgagagcggttgcggtacgtaggaaggctctttcaattttggcagaagctcctgtattagcatctgatcgtttaccatataaaaattatgactacgaccgcgtatttggcgcttgttgtgaaaatgttataggttacatgcctttgcccgttggtgttataggccccttggttatcgatggtacatcttatcatataccaatggcaactacagagggttgtttggtagcttctgccatgcgtggctgtaaggcaatcaatgctggcggtggtgcaacaactgttttaactaaggatggtatgacaagaggcccagtagtccgtttcccaactttgaaaagatctggtgcctgtaagatatggttagactcagaagagggacaaaacgcaattaaaaaagcttttaactctacatcaagatttgcacgtctgcaacatattcaaacttgtctagcaggagatttactcttcatgagatttagaacaactactggtgacgcaatgggtatgaatatgatttctaaaggtgtcgaatactcattaaagcaaatggtagaagagtatggctgggaagatatggaggttgtctccgtttctggtaactactgtaccgacaaaaaaccagctgccatcaactggatcgaaggtcgtggtaagagtgtcgtcgcagaagctactattcctggtgatgttgtcagaaaagtgttaaaaagtgatgtttccgcattggttgagttgaacattgctaagaatttggttggatctgcaatggctgggtctgttggtggatttaacgcacatgcagctaatttagtgacagctgttttcttggcattaggacaagatcctgcacaaaatgttgaaagttccaactgtataacattgatgaaagaagtggacggtgatttgagaatttccgtatccatgccatccatcgaagtaggtaccatcggtggtggtactgttctagaaccacaaggtgccatgttggacttattaggtgtaagaggcccgcatgctaccgctcctggtaccaacgcacgtcaattagcaagaatagttgcctgtgccgtcttggcaggtgaattatccttatgtgctgccctagcagccggccatttggttcaaagtcatatgacccacaacaggaaacctgctgaaccaacaaaacctaacaatttggacgccactgatataaatcgtttgaaagatgggtccgtcacctgcattaaatcctaa

SEQ ID NO: 401 - DNA, 2452 bp, Saccharomyces cerevisiae
catgcaagatttcttccctgcctgtatatggaaagcagatatttaacgtggcccttttgttgttctttgtagtttccacagcaacccgaacatcttctaatagagacttatccaacaaagagagatcgccgataattttaatgcgtaccccatacttacaggccagctctccacgttctgtgatttgtcgtatcctttcgcgcgctaaagtcatcagtgattcaacttcccgtgagctcctcttgaaattttcaattgaaaaggcaaacacggtagccgtatcgactcctgcttcataacacagttctaagattctactcatactaacaaatcctgcctcgtggccctcctttacgtccatctctttctttctagcgaatctcctgttcccatccatgatgaacccaacatgtctaggtacacagttagatgcacgcaatgtgcgcgaaaagatgttttttgtccactttaacacaaatgaatgaccaggtataccactatccgtttccataccgtcttttacctgtgtttaccctatttttactgcttaagttctattgaaacctgtcattattacgaaaatttttttttttttcattctaagcattttgttggcatcttcggaaaaagcccgagcgagggtaacagggttaggggattagaagattaaagtaagacacattataatctatagagattttctacaacacaagaagtgtgccattcagtccgaattgagtacagtgggacgatgtttcaaaggtctggcgctgctcatcacatcaaattgatttcatctcgaagatgccgctttaaatcctcctttgcagttgctttaaacgctgccagtaagttggtaactcccaagattctttggaataatcccatatcattagtctcgaaggagatgaacacattggccaaaaatatagttgccctcatcgggtctggccatccggtgctaaacaaggttactagttactattttgaaacagaaggcaaaaaagtacgtcccttgttagtgttgttgttgtcaagagcactttctgaaattcccatgacagaaagaaatcacttgaaaattgacaagtcggatgttcctgaggacccaatttactctaaacctagtcaaaatcaactatttcaacgtcctgcaagtagcatatccccactacatattcttcacggtattaaaccactaaatcccttgacaaaaggtcctgagcctttgccagaagaaacttttgacaaacaaagagggattttacccaaacagagaagattagcagagattgtagagatgatacacactgcgtctttacttcatgatgacgttattgatcattctgatacaagaagaggaaggccaagcggaaatgctgcctttaccaacaagatggccgttttggcgggtgattttctcttagggagagcaacagtgtcaatttcaagattacacaaccccgaagtcgtagaactaatgtctaatagtattgcgaatcttgtcgaaggtgagttcatgcaactgaaaaatacttccattgacgcggatatcgataccatcgaaaatggccataagctacttccggttccttctaaaaagcttgaagttaaagagcacgactttcgtgttccaagccgccaacaggggctgcaattatctcatgatcagattatagaaactgcatttgaatactacatacacaagacctatctgaagactgctgctttgatatcaaaatcttgcagatgtgctgctatattatctggggcatcacctgccgttatcgacgaatgctatgatttcggtagaaatctaggtatatgtttccaactcgtagatgatatgcttgattttactgtgtctggaaaagatttagggaagccatccggcgcggatctaaaattaggtattgctactgctccagtcttgtttgcatggaaagaagacccatctttaggtccactaatttcacgcaatttttcagagaggggtgatgttgaaaaaactattgattctgtgagactccataatggtatagcgaagacgaaaatactagcggaggaatatagggacaaggcattacaaaatctacgggattctcttcctgaatctgatgctcgttctgccctagagtttttaactaatagtatactaacaagaagaaagtaaaccttgaaatttcaaataaagggtgaagaataaagagaaaatgaagaaggtcatagtgtcgcattattctatattctatatgtaaatagtttttatatgtttttagtaaaagaagaaatatacaagcattaaggatcaggctggtggtaaaaaagctgcaaataggatagtctgtaaaggtatccagaatgccaaccagtatatgtaaaacttgactatcttatcgtcacctttcggattttccattttttttggatccccgggtaccgagctcgaatt

SEQ ID NO: 402 - DNA, 1316 bp, Saccharomyces cerevisiae
tcaagagagtctgacatagtattttcgttggcatagcaaccgattgataatgaaacatcactcaagacgaattgacaaatgggccactatggtaaaacaattctttacatgataccaccagtatatagaaaggttctcgtgttgatgaattatataagaaagtgaaaatcgatttcaagataattactctttttacctcctctttcattgtggtcaccgtttttgaacacaacatgcaccaagattttcaagaagacgagcatgagtatccagacatcagacgcaatccgctgcatgaggtgaccatgacttcctacatactggggattcttttaggtatatttgttggtctttttccacaaattagattcaagaattttaacctctttattattgccctgtccttattccattttttggagtattatattacagctaaatacaatcctcttaaggtacattcagagtcctttcttctgaacaacggcaaaagttacatggcggcacattcctttgctattctggaatgcctcgtagaaagctttctttttcctgatctgaaaatttttagctactctctagctaccaagctttgtacagtacttggatgtcttctagttattctgggacaatataccagaactattgctatgcatactgcgggacattccttttctcatattgtgaagaccaagaaggagtccgatcatgttttagtgaaaactggcgtttactcctggtcaagacatccaagttatcttgggttcttttggtgggcaattggcactcagctactgcttctaaatcccctatcattggttattttcatttttgtactttggaaatttttcagtgatagaattcgtgtggaagaaaaatatttgatagagttctttagcgcggaatacatagaatacaagaataaggttggtgtcggaataccttttatataatagtaatgattgtgttagttatggactggatttttgtgttatgtaagattttatctaatcttgtgcatctgtatttggtaggtaataaatgctaggggaatgcaaacagtgatattgcctttgagtattgaaaagaagaaaatatttctttttcgaacggaaaattatagaaaatgaaggtcatatgcacaattacaaagaaaatatttcatgaaagagctggacggaaccgtccaattttagcctcgtttttaaccactgttgtatttctttccataatcttgcgttttccatgtacccattatgggtgaagttgaggatgtattagaaagttgtcttttttggggcagtacattagagtaa

SEQ ID NO: 403 - DNA, 2170 bp, Saccharomyces cerevisia
ggatccaacctacggaatctcgcccaatgggaaattctcaacgccatggtggtttactagtctatatgctcgcataacgggtgcccacaatgaaactgcaacattcaacaacaactttgccaatgtgccatcttcgcaaagagaaacgagaacttttagtggaagaggtcaacgattgggtacggcccctgcaacattgtctcaaaccagtggcacagattcaggcagagcttctggaagtcaattaagaagtggcccatcgaatttgaaccaatttcaaggccgcggccaacgagtaggacaaacaaacagcccctccgactcacaataacaacttttatctatttctatgtactttgccattcattatatacatcaagagagtctgacatagtattttcgttggcatagcaaccgattgataatgaaacatcactcaagacgaattgacaaatgggccactatggtaaaacaattctttacatgataccaccagtatatagaaaggttctcgtgttgatgaattatataagaaagtgaaaatcgatttcaagataattactctttttacctcctctttcattgtggtcaccgtttttgaacacaacatgcaccaagattttcaagaagacgagcatgagtatccagacatcagacgcaatccgctgcatgaggtgaccatgacttcctacatactggggattcttttaggtatatttgttggtctttttccacaaattagattcaagaattttaacctctttattattgccctgtccttattccattttttggagtattatattacagctaaatacaatcctcttaaggtacattcagagtcctttcttctgaacaacggcaaaagttacatggcggcacattcctttgctattctggaatgcctcgtagaaagctttctttttcctgatctgaaaatttttagctactctctagctaccaagctttgtacagtacttggatgtcttctagttattctgggacaatataccagaactattgctatgcatactgcgggacattccttttctcatattgtgaagaccaagaaggagtccgatcatgttttagtgaaaactggcgtttactcctggtcaagacatccaagttatcttgggttcttttggtgggcaattggcactcagctactgcttctaaatcccctatcattggttattttcatttttgtactttggaaatttttcagtgatagaattcgtgtggaagaaaaatatttgatagagttctttagcgcggaatacatagaatacaagaataaggttggtgtcggaataccttttatataatagtaatgattgtgttagttatggactggatttttgtgttatgtaagattttatctaatcttgtgcatctgtatttggtaggtaataaatgctaggggaatgcaaacagtgatattgcctttgagtattgaaaagaagaaaatatttctttttcgaacggaaaattatagaaaatgaaggtcatatgcacaattacaaagaaaatatttcatgaaagagctggacggaaccgtccaattttagcctcgtttttaaccactgttgtatttctttccataatcttgcgttttccatgtacccattatgggtgaagttgaggatgtattagaaagttgtcttttttggggcagtacattagagtaaggcctccttggaatgaatggatttacaatgagtctggacttctgcaacggtatggttgcagtgttgggaggattggggacactgttttcattgtttatcaaaggaagcccagacttgttagagtttgtacgaattgggacgttctggggcaacgtgggaagtacaggcgtagaattttgtcgcccgacgtcattcctcgtgattgcttctgttgttggtagagagttattcctttgatcaagcccattattcgacaaaatagttgccccacgcaatgttgaatcagggaatcttgtggtattcaaacgtggatcattaaatcttgagttcacggtggaaggaaaggacatatccatattctgttcacgtggtggaaaaactgaagattcttgaggctggacaaatgaatctgatatcgatgcagtataactgttggaatttatgggaggccttattgttttatcgggaacagtggatcc

SEQ ID NO: 404 - DNA, 1383 bp, Saccharomyces cerevisiae
gatcttcttttttacctgttttattcacttttttttttttttctgagttgttgcgccttggaagaatggaaaagcaatagtttcagtgactatagtatacaatcaaaacacccgccagttcaaaactattacttggtcactaacccccaagtcatctctagcaatttaaatttcaattttaagaaaacctttatttatccaacgtgaacaagtactttcaagcacttctgcccaccgctatatcgtggaaaaatgtgtcaagctaccaatggcccgagtagagttgtgactaaaaagcataggaaatttttcgaaagacatctacagttgcttccctcttcacatcagggacatgacgtgaacagaatggcgataatattctactcaatctcaggactctctatatttgatgttaacgtttctgcgaagtacggcgatcatcttggctggatgcgcaaacattatatcaaaacagtgctggatgatacagaaaatactgtgatatctggatttgttggaagcttagtcatgaatatccctcacgcaacaacgattaatctaccaaatactctctttgcattgttgtccatgattatgctgagagattacgagtattttgagactatactagacaaaagaagcctggcgagatttgtttctaagtgccaacgacctgaccgtggctcgtttgtatcttgtttagactataagacaaattgtggatcttcggttgattcagacgatttaaggttttgctacatcgcagttgccattctgtacatatgcggatgccgatccaaagaagactttgatgaatacattgatactgagaagttgcttggctatataatgtcgcaacaatgctacaacggagctttcggtgcccacaatgaaccacactcagggtacacatcttgtgcgctgtctaccttagctttactctctagtttggaaaagctatcagacaagtttaaagaagacaccataacctggctattacataggcaagtatcaagccatggatgtatgaaatttgaaagcgaattgaatgccagctatgatcaatctgatgatggcggtttccagggaagggagaacaagttcgctgatacgtgttacgcattttggtgcttaaattcactacacttactaacaaaggattggaaaatgctatgccaaactgaactagtcacaaattatttgcttgatcgaacgcaaaaaacattaactggaggctttagtaaaaatgacgaagaagatgctgatttatatcacagctgtctagggagcgctgcgttagcattaattgaggggaaatttaatggagaattatgcatacctcaagaaatatttaatgattttagtaaaaggtgctgtttttga

SEQ ID NO: 405 - DNA, 1448 bp, Saccharomyces cerevisiae
tctagagtataattattttgaatgagtttcgttgacattttcagttcatgcgatcatcttactttcatggttgctccttgccgttaaaattgaaacgaaaaaagcgggaatacaacaatgtcaccttacacgagcagagaaaagggcagcaatagcgacaataaccgataatgccaggccttccagagccctatgctgacctatattcatcatgacgctatccatatgcaactagagacctgctgggaagcgctctctcatttttgaaggttgcagcagcttgcgcgccggttttcgattgggcctcgtgataaaacacatcagcaaagtttcgcttttgacattctgttaaattggtccttaactgttggtgcagacctactgcaagactgttaattatggtatattatatatcaagtgctgatacaacgtacaccatcgaaaatggaggagtacgattattcagacgttaaacctttgcccattgagacagacttgcaggatgaactgtgcaggattatgtataccgaggattataagcggttgatgggactcgcaagggctctgatcagccttaacgaactgtcacccagggcactacagctaacagccgaaattatcgacgtggcgccagccttctacaccatatggaactaccgattcaatatcgtcaggcacatgatgagtgaatccgaagacactgtcttgtacctgaacaaggaattagactggctagatgaagttacgctgaataatccaaagaactatcagatctggtcctatagacagtctcttttgaagctacatccgtctccttccttcaaaagagagctgcctatcttaaaactgatgattgatgatgattccaagaattatcacgtttggtcgtacagaaagtggtgctgtttgttcttcagtgactttcaacatgagctcgcctacgccagcgacctcatcgagacagacatttataacaacagcgcatggactcataggatgttttactgggtgaacgctaaagatgtcatttcaaaagtggaattggccgacgagctccagttcattatggacaagattcaattggttccgcagaacatcagtccgtggacctacctccgtggtttccaagagctattccatgataggctacagtgggatagcaaagtagtcgacttcgccacaaccttcatcggtgacgtattgtcacttccaattggctcaccagaggatttgcccgagatcgagtcctcatatgccctggaattcctggcatatcactggggggcagacccttgtacccgagacaacgctgttaaggcctatagcttgctagcaatcaaatacgatcctattagaaaaaacttgtggcaccacaaaataaataatctgaactgaatatatgtaagcactctatttgtacgaatatatttacgtgtgtacgtgcatgc

SEQ ID NO: 406 - DNA, 2427 bp, Saccharomyces cerevisiae
aagcttgagctgcatgggattcagcattaggacataatccaaagccaccatcaaaattataacacttgagtacaaagtctacagcagggtcaacaacttcagacgttaattcacccaaaattgatagtgcactcaaggctgtataaacaaaccttgtatctacctccccaaacctgtcaccctggaacgaaccatcttccaattgattcccacggatgaaggaaatcaagcgaaccttacgatcttttccaagaacatccaaagcatcataagtggccaagatctgtacggcggacaatgtagttaataaatgtgcatcatgtcttggaaatggtgcgaaagcgccgtatttgtcgtcccaacagctcagaacaaatgatataacctcttctttcacaaatgtctctggagaatcaagcacacacaaggcagtaagtccccaatatatcccattcaaacgaagatgctcggtaagccagtattcaaaattatgcttgtttgtatccaatgattcaatataacgtatatgcttttccttaagtagcgtaagagatcctgacatgttcacaattttctagtggagaaaacagaatcattagtaacagtagtggtatctgaaatatatatatacacagtttcttaaattgttgtctttactactggtattactatcgctattacaagcgaagtcattaagtacggaaatgtttaaacgtagagagctagtaaaggaaaggctgttacatgatcactaatcgtaactttgcaacgagcctgagggaaatgactagtactattaccttgttgaacggaatatgagtaaatatattgcacttgaaaatcttccggtagatttgcaacataaaggagctacacaaaatgaaagcaccgctgatatactgaaacagttgccacatgaacgattacaagctgtcctggagaagataccagaagaagatcttgaggtgagacgattgctttcaattttaaagaagccggaagtagtggagaatgaagatgtacaacaaagaagaatacggttggctgaaattttaatggttgatgaaattgatcttgagaacattaataacatggaaaacataaatggggaagaagtagacgaagaggacgatgaggacttcttcactccagcaacatctgagctcatttttgcgagaagatttttgataaattattcacttgaaagatctcgaaagaggctacagaaagagatggaaagacatcaaaagttcaatacaagacaggaattactcagtcggcgtacagaattacagcgtatggctaatttagagcttgctggctctcaattagtatctacgaagcctatttccgcagtttctttatctaccgatgacatggttgtcgcaacgggaagctgggcaggtgatcttcaggtattaaattctcaaacactgcagccattgacacaaaaactcgactctcatgtagggaaaatcggagctatagattggcatcctgattcaaacaatcaaatgatttcatgcgcagaagacgggctcatcaaaaactttcaatactcaaacgaagagggcggccttcgattattgggagatcttgtgggacatgaaagacgtatttctgatgtgaaataccaccctagtggcaaatttataggtagtgcctctcatgatatgacttggagactttgggatgcgtcaacacatcaagaactgctgctacaagaaggccatgataagggagtgtttagtctgtcttttcaatgcgatggatctcttgtttgtagcggtggcatggactcgctttcaatgctatgggatataagatccggaagtaaggtgatgacactcgcaggacactcaaagcctatttacaccgtagcttggtcaccaaacgggtatcaagtagccactggtggtggtgatggaatcattaatgtttgggacatcagaaaacgggatgaaggccaactaaatcaaatattggcgcatcgtaacatcgttacgcaggtaaggttttcaaaggaagacggcggaaagaaacttgtctcttgtggctatgataatttgatcaatgtgtatagtagtgatacgtggttaaaaatgggaagtttagcaggccacactgataaaattattagcttggatatttcgaataattctcattttttagtgagcggcggatgggataggtctatcaagctctggaattgattgtgtaaagaaatgtatttagtatttttgaaactaacgttttattaacactgcattatttatttaattatacatttcctggtttttttgccctggattttttttttgtgttaccattttgagtacgaactcgtggaattgttaagttttccaagttgtccatcgtcttcgataactgtcccactaactcctcgtttagatcattctcaagctt

SEQ ID NO: 407 - DNA, 2138 bp, Saccharomyces cerevisiae
cttatagtgaacaggcttccatcatatatacatatatatatatgttatatatgtatatcatcacttatgctgctccaggagatgtaggtatctattctttcttaacggatccgcatctattaattggaccaaatattgttccgagcttctttccgttagagcttccttttcttccagaatatcttcgagaactaataaaattttcaagcaccaaatattttgcttcccggaaaattcaatttcgtcattatttattaacagaatgttttctctcaagtctttcaacattttaaggtactcttgttcgtccagagttttacaaacaatgtcgtttttaatgaaccacttgatataaaaccatacggattggtcttcggcgtcggtaaacatagcgttgatgatataagatatttcagtccgaatatactccttttgattcccaacctctcctttctgaaacattctgcttatgatctgtactctttggtgccatgcagaataatttgaaatgttattgttaatctttattgttgtgtattcaaactcctccttgtcaagacttttattagtgatactctctatgttaccaacaactattctgcggtaatgccatccgtggtaatttcttgcatcttgttccaataacttattcacgacagcaagttcagtttgccacactttaggggaactcgtaggataatgtttcaagacccaaagtctgtgattccatatccaatagactttggggtaatccttcaatagcatcattacaaaaactaactctttatcccagaaaggtatttccaactcagaagccaaactcgctataatatcccttctgtaattccaaatagcattaaattccggatttttctcaagaagttctgatgttttcttcagagcttcaattgagtaaattttttcatctctcatattcaaaacattttcagtcaagcttctataatcatatattttcttttcgtcttgaactctcttttgtctcagtaattccttggtccactgtttccttttaatgccatgctgtttaatgtggcaaatataaaaaattgcttggtagtcagtaaaaaaaagaattcataatgtaacgaacatttgaagtgcacataccattgctgacctactgctttatagtataaattcagtatactaggtatatgtggctcaaaaatgtggtttttttcttttttgcctttaatttttttcaaatgtttacgtatggtttatgatttaacatttcaagaatagaaatcgccccgaagaatgattgatgttaaatactcgtacaagagtattgaaaaccacttcaaaggggcccaatagcacatttaatgtcacaatcaatatcactaaagggttcaacaaggacagttacagaatttttcgagtacagcattaattccattttgtaccaaagaggcgtatacccagcagaagatttcgtaacggtgaaaaagtacgatcttacgttactaaagacacatgatgatgaactgaaagattacattcggaaaattcttctacaagttcacaggtggcttcttggtggaaaatgcaatcaattagtattatgtattgtagacaaggatgagggagaggtggtggaaagatggtccttcaatgtgcaacacatttctggcaatagcaacgggcaggatgatgttgtagatttaaatacaacacaatcacaaatcagagctttaatcaggcaaatcacctcaagcgttacctttctgcccgaactaacaaaagaaggtgggtacacattcacagtacttgcatatacagacgcggatgctaaagttccgttagaatgggccgactccaatagtaaagagatacctgatggtgaagtagttcaattcaaaacattctctaccaacgatcataaagttggtgcgcaggtcagctataaatattaatagaattcaagtcaaaaaaaaaaaaaaagacggaagtccaaaaaaatctcgttttcgatgtttagaaagaatatagatttatgaactatattatactatactacgtacttcctctgtaaaccacttcatgcgttttttcaagtgcctctgttaaagaaccttgagtgagaaacgaagtctttgacactcaaactttgc

SEQ ID NO: 408 - DNA, 36 bp, Artificial sequence
  Primer
  misc_feature (1)..(36): PRIMER
tatcttggcctccatgtcgactccagactcgtaaac

SEQ ID NO: 409 - DNA, 2496 bp, Saccharomyces cerevisiae
gagctctaactccgcaggaactacaaaccttgcttacacagagtgaacctgctgcctggcctgctctgactcagtacatttcatagcccatcttcaacaacaataccgacttaccatcctatttgctttgccctttttcttttccactgcactttgcatcggaaggcgttatcggttttgggtttagtgcctaaacgagcagcgagaacacgaccacgggctatataaatggaaagttaggacagggccaaagaataagagcacagaagaagagaaaagacgaagagcagaagcggaaaacgtatacacgtcacatatcacacacacacaatgggaaagctattacaattggcattgcatccggtcgagatgaaggcagctttgaagctgaagttttgcagaacaccgctattctccatctatgatcagtccacgtctccatatctcttgcactgtttcgaactgttgaacttcacctccagatcgtttgctgctgtgatcagagagctgcatccagaattgagaaactgtgttactctcttttatttgattttaagggctttggataccatcgaagacgatatgtccatcgaacacgatttgaaaattgacttgttgcgtcacttccacgagaaattgttgttaactaaatggagtttcgacggaaatgcccccgatgtgaaggacagagccgttttgacagatttcgaatcgattcttattgaattccacaaattgaaaccagaatatcaagaagtcatcaaggagatcaccgagaaaatgggtaatggtatggccgactacatcttagatgaaaattacaacttgaatgggttgcaaaccgtccacgactacgacgtgtactgtcactacgtagctggtttggtcggtgatggtttgacccgtttgattgtcattgccaagtttgccaacgaatctttgtattctaatgagcaattgtatgaaagcatgggtcttttcctacaaaaaaccaacatcatcagagattacaatgaagatttggtcgatggtagatccttctggcccaaggaaatctggtcacaatacgctcctcagttgaaggacttcatgaaacctgaaaacgaacaactggggttggactgtataaaccacctcgtcttaaacgcattgagtcatgttatcgatgtgttgacttatttggccggtatccacgagcaatccactttccaattttgtgccattccccaagttatggccattgcaaccttggctttggtattcaacaaccgtgaagtgctacatggcgatgtaaagattcgtaagggtactacctgctgtttaattttgaaatcaaggactttgcgtggctgtgtcgagatttttgactattacttacgtgatatcaaatctaaattggctgtgcaagatccaaatttcttaaaattgaacattcaaatctccaagatcgaacagtttatggaagaaatgtaccaggataaattacctcctaacgtgaagccaaatgaaactccaattttcttgaaagttaaagaaagatccagatacgatgatgaattggttccaacccaacaagaagaagagtacaagttcaatatggttttatctatcatctcgtccgttcttcttgggttttattatatatacactttacacagagcgtgaagtctgcgccaaataacataaacaaacaactccgaacaataactaagtacttacataataggtagaggcctatccttaaagataaccttatatttcattacatcaactaattcgaccttattatctttcgaattgaaatgcattatacccatcggtacgtctagctttgtcaccttccccagtaaacgctgtttcttgccgacaaacaatgtggccctctctccgtcaatctgtaacgacccaaatcgtattaaagtttcgccgtcctgttcactgaaccttccctcatttggagaatctctcctcgccagcgacgcaaagtccttaggcaactctagttcaccttgaatctccagcatcatcatcccaagcggtgttatcaccgtggtctgcttttctcttgactgtgtcaacttctgccattgactagcatctatatctacactaggcattcttttcagctgtttattgggctgaatgatagtgataattcttttttctatcactccttcggctatattagtggttagcttactaaaaaagattaaaggaaaaatgaaattcaagatgctaacgttgacatgtatattttaagaaaacaaaaatcatacaaagaggagatcggatataaaagaataacataaatatgtttagtgcattaggtaaatgggtccgaggctctcgcaatgataaggactttgtgacgaagtataccgcagatttatcacaaataaccttcacagatccatcaattagatgtcgcgttaaagaaaagccaatccatcttgagtcaatggcaatcaaatctgaccttttatggtattgcgttaa

SEQ ID NO: 410 - DNA, 2311 bp, Saccharomyces cerevisiae
gatcgtggcgaattgggaatcgttctgcaagctcttctaccaaaccatcggcgaatttgcgtcgctttaatgcgatactgccgtagcgggccttcgtatagctcggccgagctcgtacaaaaggcaagcagtgtatcggacagagctgatataacacaatacgctcgtagtcgatgcatgccgtggctgctctcggtcgggtataagtcttagacaatagtcttacctcgcatgtataataaatcttttgtatttaatctattatatgtttctatgcttttttttcctattgttgtttgcttttccttttccttatttctttctagcttctaattttctttcttttttttttttttttcattgaaaattatatatatatatatatatcagaacaattgtccagtattgaacaatacaggttatttcgaacaattgaaaaaaaaaaatcacagaaaaacatatcgagaaaagggtcatgtctgctgttaacgttgcacctgaattgattaatgccgacaacacaattacctacgatgcgattgtcatcggtgctggtgttatcggtccatgtgttgctactggtctagcaagaaagggtaagaaagttcttatcgtagaacgtgactgggctatgcctgatagaattgttggtgaattgatgcaaccaggtggtgttagagcattgagaagtctgggtatgattcaatctatcaacaacatcgaagcatatcctgttaccggttataccgtctttttcaacggcgaacaagttgatattccatacccttacaaggccgatatccctaaagttgaaaaattgaaggacttggtcaaagatggtaatgacaaggtcttggaagacagcactattcacatcaaggattacgaagatgatgaaagagaaaggggtgttgcttttgttcatggtagattcttgaacaacttgagaaacattactgctcaagagccaaatgttactagagtgcaaggtaactgtattgagatattgaaggatgaaaagaatgaggttgttggtgccaaggttgacattgatggccgtggcaaggtggaattcaaagcccacttgacatttatctgtgacggtatcttttcacgtttcagaaaggaattgcacccagaccatgttccaactgtcggttcttcgtttgtcggtatgtctttgttcaatgctaagaatcctgctcctatgcacggtcacgttatttttggtagtgatcatatgccaatcttggtttaccaaatcagtccagaagaaacaagaatcctttgtgcttacaactctccaaaggtcccagctgatatcaagagttggatgattaaggatgtccaacctttcattccaaagagtctacgtccttcatttgatgaagccgtcagccaaggtaaatttagagctatgccaaactcctacttgccagctagacaaaacgacgtcactggtatgtgtgttatcggtgacgctctaaatatgagacatccattgactggtggtggtatgactgtcggtttgcatgatgttgtcttgttgattaagaaaataggtgacctagacttcagcgaccgtgaaaaggttttggatgaattactagactaccatttcgaaagaaagagttacgattccgttattaacgttttgtcagtggctttgtattctttgttcgctgctgacagcgataacttgaaggcattacaaaaaggttgtttcaaatatttccaaagaggtggcgattgtgtcaacaaacccgttgaatttctgtctggtgtcttgccaaagcctttgcaattgaccagggttttcttcgctgtcgctttttacaccatttacttgaacatggaagaacgtggtttcttgggattaccaatggctttattggaaggtattatgattttgatcacagctattagagtattcaccccatttttgtttggtgagttgattggttaactacagcttataagggagagaggataggaaccgtcaaacattaagctgcaccttttttttttattacagaagtcggcttggaaggcttgtatagtacattacgataaacacatcttatttttatttattacttatttattttacatattttcaaaaaaattcacatatcatttattattaaccgaagtgttttatactttttgttctttccttaaaaatgcctccaacagaaaaggaaaaatggcttgatatgcttcaaaatatgcttagagattcatattcggttatcaattaacgatattacttccttaagtgatattaaatcaagcttgccggattctgcag

SEQ ID NO: 411 - DNA, 3112 bp, Saccharomyces cerevisiae
gtgaaagaatcacatatatagcgccaaattactgggattgctgttgtatggtgcacagttggtttgttttaacggtatgcgttttgtatacctctattatgtagtgcaagaaaatctgctgctattcgtgattactgttacaacctaacggtttaaatgaaacctggttctgaagggtcattttataacttcaagttcccttagcctttcgattcattttgattatgccatttctagaccgtgttataggcgctggcgtttaatttggtgtagcttggtttagtcaagagttgtattagtgttcctcgataaagtcgatgtttccggatattgtgttaaaatttcaagtatgctactaatggggtaaagttgcatgattagcagagacatatggcttgttatggttcggcttcctcatttttcatgcttagtttttgtccatctcattgtacatttctgaatcctaatgcatgactccctaacattactattaaattctcaatagtgaagaataagcaaaatgggaaccatgataatttctagctttctctccacccctattttaatttgcaatcatatatagtactttcaatagcatcttttctagatttgatatctgcggaaacttttcgtttataatcgtttaggtgaaaagtttttatatcggttatttacagatatacattttctcaaaaaaaaaaaaatataatacatgccctcagcttttaataaagccattgagcacaagcctctccagtaatgtactgctgtgcccaataaccttaccaataatcgtcgcccacaaagaaagtacaaaacagatgacagaattttattctgacacaatcggtctaccaaagacagatccacgtctttggagactgagaactgatgagctaggccgagaaagctgggaatatttaacccctcagcaagccgcaaacgacccaccatccactttcacgcagtggcttcttcaagatcccaaatttcctcaacctaatccagaaagaaataagcattcaccagatttttcagccttcgatgcgtgtcataatggtgcatcttttttcaaactgcttcaagagcctgactcaggtatttttccgtgtcaatataaaggacccatgttcatgacaatcggttacgtagccgtaaactatatcgccggtattgaaattcctgagcatgagagaatagaattaattagatacatcgtcaatacagcacatccggttgatggtggctggggtctacattctgttgacaaatccaccgtgtttggtacagtattgaactatgtaatcttacgtttattgggtctacccaaggaccacccggtttgcgccaaggcaagaagcacattgttaaggttaggcggtgctattggatcccctcactggggaaaaatttggctaagtgcactaaacttgtataaatgggaaggtgtgaaccctgcccctcctgaaacttggttacttccatattcactgcccatgcatccggggagatggtgggttcatactagaggtgtttacattccggtcagttacctgtcattggtcaaattttcttgcccaatgactcctcttcttgaagaactgaggaatgaaatttacactaaaccgtttgacaagattaacttctccaagaacaggaataccgtatgtggagtagacctatattacccccattctactactttgaatattgcgaacagccttgtagtattttacgaaaaatacctaagaaaccggttcatttactctctatccaagaagaaggtttatgatctaatcaaaacggagttacagaatactgattccttgtgtatagcacctgttaaccaggcgttttgcgcacttgtcactcttattgaagaaggggtagactcggaagcgttccagcgtctccaatataggttcaaggatgcattgttccatggtccacagggtatgaccattatgggaacaaatggtgtgcaaacctgggattgtgcgtttgccattcaatactttttcgtcgcaggcctcgcagaaagacctgaattctataacacaattgtctctgcctataaattcttgtgtcatgctcaatttgacaccgagtgcgttccaggtagttatagggataagagaaagggggcttggggcttctcaacaaaaacacagggctatacagtggcagattgcactgcagaagcaattaaagccatcatcatggtgaaaaactctcccgtctttagtgaagtacaccatatgattagcagtgaacgtttatttgaaggcattgatgtgttattgaacctacaaaacatcggatcttttgaatatggttcctttgcaacctatgaaaaaatcaaggccccactagcaatggaaaccttgaatcctgctgaagtttttggtaacataatggtagaatacccatacgtggaatgtactgattcatccgttctggggttgacatattttcacaagtacttcgactataggaaagaggaaatacgtacacgcatcagaatcgccatcgaattcataaaaaaatctcaattaccagatggaagttggtatggaagctggggtatttgttttacatatgccggtatgtttgcattggaggcattacacaccgtgggggagacctatgagaattcctcaacggtaagaaaaggttgcgacttcttggtcagtaaacagatgaaggatggcggttggggggaatcaatgaagtccagtgaattacatagttatgtggatagtgaaaaatcgctagtcgttcaaaccgcatgggcgctaattgcacttcttttcgctgaatatcctaataaagaagtcatcgaccgcggtattgaccttttaaaaaatagacaagaagaatccggggaatggaaatttgaaagtgtagaaggtgttttcaaccactcttgtgcaattgaatacccaagttatcgattcttattccctattaaggcattaggtatgtacagcagggcatatgaaacacatacgctttaagttttatttataagtgttgttagaggctgcaacaattagaaactagtgcaaaactagtatatttatttgtatatgtagtagtaaaataataggtg

SEQ ID NO: 412 - DNA, 2590 bp, Stevia rebaudiana
gcaaaacaaatccctctgatcctttcaccatgaagaccggcttcatctctcccgccaccgtcttccaccaccgtatttctccggcaaccaccttccgccaccacctttctccggcgaccaccaactccactggaattgtagctcttagagacatcaacttccggtgtaaagcggtatccaaagagtactctgatttactacaaaaagatgaggcttcatttaccaagtgggacgatgacaaagtgaaggaccatttggacacaaataagaatttgtatccaaacgatgagatcaaggagtttgttgagagcgtgaaagcaatgtttggttctatgaatgacggagaaataaatgtgtcagcgtatgatacggcttgggttgcactcgtgcaagatgttgatggaagtggttcccctcaatttccatcaagtttggagtggatcgcgaacaatcaactctcagatgggtcttggggcgatcatttgttattttcggctcatgataggatcattaacacgttggcatgtgttatagcgcttacttcttggaacgtccatccaagtaaatgtgaaaaaggactgaattttcttagagaaaacatatgtaaactcgaagacgagaacgcggaacatatgccaattggttttgaagtcacgttcccgtcgctaatagatatcgcaaagaagctaaatattgaagttcctgaggatactcctgccttaaaagaaatttatgcaagaagagacataaaactcacaaagataccaatggaagtattgcacaaagtgcccacaactttacttcatagtttggaaggaatgccagatttggaatgggaaaaacttctgaaattgcaatgcaaagatggatcatttctgttttctccatcatctactgcttttgcactcatgcaaacaaaagatgaaaagtgtcttcagtatttgacaaatattgttaccaaattcaatggtggagttccgaatgtgtacccggtggatctattcgaacatatttgggtagttgatcgacttcaacgacttgggattgctcgttatttcaaatcagagatcaaagattgcgttgaatatattaacaagtattggacaaagaatgggatttgttgggcaagaaacacgcacgtacaagatattgatgataccgcaatgggatttagggttttaagagcacatggttatgatgttactccagatgtatttcgacaatttgagaaggatggtaaattcgtatgtttcgctggacagtcaacacaagccgtcaccggaatgttcaatgtgtatagagcgtcacaaatgctctttcccggagaaagaattcttgaagatgcaaagaaattttcatataattatttgaaagaaaaacaatcgacaaatgagcttcttgataaatggatcatcgccaaagacttacctggagaggttggatatgcgctagacataccatggtatgcaagcttaccgcgactcgagacaagatattacttagagcaatacgggggcgaggatgatgtttggattggaaaaactctatacaggatgggatatgtgagcaataatacgtaccttgaaatggccaaattggactacaataactatgtggccgtgcttcaactcgaatggtacactatccagcaatggtatgttgatatcggtatcgaaaagtttgaaagtgacaatatcaaaagcgtattagtgtcgtattacttggctgcagccagcatattcgagccggaaaggtccaaggaacgaatcgcgtgggctaaaaccaccatattagttgacaagatcacctcaatttttgattcatcacaatcctcaaaagaggacataacagcctttatagacaaatttaggaacaaatcgtcttctaagaagcattcaataaatggagaaccatggcacgaggtgatggttgcactgaaaaagaccctacacggcttcgctttggatgcactcatgactcatagtcaagacatccacccgcaactccatcaagcttgggagatgtggttgacgaaattgcaagatggagtagatgtgacagcggaattaatggtacaaatgataaatatgacagctggtcgttgggtatccaaagaacttttaactcatcctcaataccaacgcctctcaaccgtcacaaatagtgtgtgtcacgatataactaagctccataacttcaaggagaattccacgacggtagactcgaaagttcaagaactagtgcaacttgtgtttagcgacacgcccgatgatcttgatcaggatatgaaacagacgtttctaaccgtcatgaaaaccttctactacaaggcgtggtgtgatccgaacacgataaatgaccatatctccaaggtgttcgagattgtaatatgaaaacagctaattataatatggttgagtaagtgttgaatggtaatttagatatcccaatgtccatcttgagttagattattcaatgttttaataaccgggtcgggttgtgtgaccgtcggaccagtttcaaaagcatatattagaattttgatgataggtgtgtaattgttaaatattaataaattgtgtctttaact

SEQ ID NO: 413 - DNA, 900 bp, Saccharomyces cerevisiae
atgtccacaagcattacagtaagaaatagagatcgatcgctaccaccgctattgctccccaatgtttccctgctagaaaaagatatacggcgtaaaggcacccaaaatgtgggcatcaccgatccagaactcttgtcgaccacttggacgaggaagcgggcttttccgactgacgagcttttaggaggctataagagattaaagcctgctgccgctgacagtaatgagtgcgctattggtattgccacggtgacgccgccgccaacgctccccgtaagtgcgattgttccccctccacaaaattacactccaccattgtttgagtatcatcctcatgctcttgcttccatggtcaatgaagacgctaatgcgtcatgcactcaaatgtctataatttcgcgctcaacgagcaactcgacaacctcctctgccacatctactagttcaatttccaagagacaaagaagtggcccaagttgtgacaaatgtcgtttgaaaaaaataaaatgtaatgcgaaaattgagattttgcttcaagacgatactataatgccaatgatctcgaacaagttgcggtacgtcttgactcctgacgatattcggctatatcgaggcacgctgttgcggaatattgccataccggatgatgtcattgagggtacaggctcacgcaagttgattaagcatattgataagttggttttgctcacaccttgtttaccatgcattaagaaaaagcattcttcttcttccactaatttcccaaaaaatgataaatgtactttttcaaaaggctttaccagagctgacataaacatttcatccaaaatctccttaaaatttaaggataaaaccatttacgacataacctatgatgactataaaagcattgatttttag
